(19) United States
(12) Patent Application Publication
(10) Pub. No.: US 2025/0041385 A1
(43) Pub. Date: Feb. 6, 2025

(54) MODIFIED ACTRII PROTEINS AND METHODS OF USE THEREOF

(71) Applicant: BIOGEN MA INC.

(72) Inventors: R. Blake PEPINSKY, Arlington, MA (US); Joseph Walter ARNDT, Swampscott, MA (US); Isin DALKILIC-LIDDLE, Watertown, MA (US); YuTing LIU, Belmont, MA (US); Benjamin Andrew SMITH, Belmont, MA (US)

(73) Assignee: BIOGEN MA INC., (US)

(21) Appl. No.: 18/717,939

(22) PCT Filed: Dec. 9, 2022
(86) PCT No.: PCT/US2022/081293

§ 371 Date: Jun. 7, 2024

Related U.S. Application Data
(60) Provisional application No. 63/288,249, filed on Dec. 10, 2021.

(51) Int. Cl. A61K 38/17; C07K 14/71

(52) U.S. Cl. CPC A61K 38/179; C07K 14/71; C07K 2318/10

(57) ABSTRACT

An isolated protein comprising a mutant soluble activin II receptor (ActRIIA or ActRIIB) extracellular domain (Ac-tRIIA-ECD or ActRIIB-ECD), wherein said mutant soluble ActRIIA-ECD or ActRIIB-ECD comprises a mutation to remove the N-linked glycosylation site corresponding to position N18 of SEQ ID NO: 1.

### CROSS-REFERENCE TO RELATED APPLICATIONS

[0001] This application claims the benefit of U.S. Provisional Application No. 63/288,249, filed Dec. 10, 2021. The entire contents of the above-identified application is hereby fully incorporated herein by reference.

### REFERENCE TO AN ELECTRONIC SEQUENCE LISTING

[0002] The contents of the electronic sequence listing (2790-0264-PCT.xml; Size: 1,669,055 bytes; and Date of Creation: Dec. 2, 2022) is herein incorporated by reference in its entirety.

### TECHNICAL FIELD

[0003] The subject matter disclosed herein is generally directed to proteins comprising modified ActRIIB and modified ActRIIA proteins and methods of using thereof.

### BACKGROUND

[0004] Muscle wasting refers to the progressive loss of muscle mass and/or to the progressive weakening and degeneration of muscles, including skeletal or voluntary muscles, cardiac muscles controlling the heart (cardiomyopathies), and smooth muscles. Chronic muscle wasting is a condition (i.e., persisting over a long period of time) characterized by progressive loss of muscle mass, as well as muscle weakening and degeneration. The loss of muscle mass occurs when the rate of muscle protein degradation exceeds muscle protein synthesis.

[0005] Muscle wasting is a debilitating and life-threatening disease state, which has been associated with the development of a number of chronic, neurological, genetic, inflammatory, fibrotic or infectious pathologies, including, e.g., muscular dystrophies, amyotrophic lateral sclerosis, myositis, denervation muscle atrophies, anorexia-cachexia syndrome, cancers, rheumatoid arthritis, osteoarthritis, insulin resistance/diabetes, sarcopenic obesity, age-related sarcopenia, androgen deprivation, corticosteroid myopathy, inflammatory bowel disease, liver cirrhosis, chronic obstructive pulmonary disease, pulmonary fibrosis, chronic renal disease, trauma, cardiomyopathy, chronic heart failure and HIV infection. Other conditions said to cause muscle wasting include chronic lower back pain, advanced age, damage to the central nervous system, peripheral nerve injury, chemical injury, extended burns, hip/knee replacement, disuse atrophy, exposure to microgravity, and long-term hospitalization.

[0006] Bone disease is considered any affliction that involves the skeletal system. Bone diseases can be very serious, and require prompt and effective treatment. Bone diseases can be very painful and can rob the patient of mobility and independence. While the causative factors vary by disease, many bone diseases are caused by, e.g., genetic factors, viral infection, chemical abnormalities, lack of bone collagen, injuries, fractures, damage to blood vessel, excessive use of alcohol, or the long-term use of certain medications. Examples of bone disease include osteoporosis, osteomalacia, osteogenesis imperfecta, fibrous dysplasia, ossificans progressiva, corticosteroid-induced bone loss, bone fracture, bone metastasis and Paget's disease of the bone.

[0007] Activin IIA receptor (ActRIIA) and Activin IIB receptor (ActRIIB) are type II receptors for a subset of TGF-β family member ligands, including, e.g., activin A, myostatin (also known as GDF-8), growth differentiation factor-11 (GDF-11), and various other bone morphogenetic proteins (BMPs) such as BMP-3, BMP-6, BMP-9 (also known as GDF-2) and BMP-10. ActRIIA and ActRIIB have been identified as the type II receptors for activins, including activin A, activin B and activin AB. ActRIIA and ActRIIB are referred to generically herein as “ActRII” proteins. ActRIIB is a high affinity receptor for myostatin, a key negative regulator of muscle growth, and thus plays central role in controlling muscle mass. The binding of these ligands to ActRIIA and/or ActRIIB can regulate cell differentiation, apoptosis, protein synthesis and degradation, mineralization, hematopoiesis, angiogenesis, steroid synthesis, adhesion, migration, extracellular matrix production and fibrogenesis. The specific response depends upon the types and levels of the TGF-B ligands and receptors as well as the cellular state and environment. The ActRIIB signaling pathway mediates cellular responses via Smad2/3 transcription factors, and activation of the ActRIIB signaling pathway has been implicated in pathogenesis and progression of many diseases including muscle wasting, bone loss, fibrosis and inflammation. Several members of the TGF-B family, including myostatin, activins and GDF11, mediate Smad2/3 activation by coupling to ActRIIB.

[0008] Previous studies have shown that pharmacological sequestration of these ligands with ActRIIB-Fc leads to profound muscle growth and bone anabolism in animal models, demonstrating about three times more muscle growth than myostatin-neutralizing antibody in normal mice, and demonstrating the ability to further stimulate significant muscle gain in myostatin null mice. In addition to its marked anabolic effects on muscle and bone, ActRIIB-Fc has also been shown to have important anti-fibrosis and anti-inflammatory effects in preclinical models and various ActRIIA-Fc and ActRIIB-Fc fusion proteins have been, or are currently being clinically evaluated in patients for the treatment of muscle wasting disorders and/or bone diseases associated with the development of a number of chronic, neurological, genetic, inflammatory, fibrotic or infectious pathologies.

[0009] However, while there have been important advancements, there still exists a critical need to provide novel therapeutics, which are both highly effective and safe, for the treatment of muscle wasting and/or bone disease associated with the development of a number of chronic, neurological, genetic, inflammatory, fibrotic or infectious pathologies.

[0010] Citation or identification of any document in this application is not an admission that such document is available as prior art to the present invention.

### SUMMARY

[0011] In one aspect, the present disclosure provides an isolated protein comprising a mutant soluble activin IIB receptor (ActRIIB) extracellular domain (ActRIIB-ECD), or a mutant soluble activin IIA receptor (ActRIIA) extracellular domain (ActRIIA-ECD), wherein the mutant soluble ActRII-ECD comprises a mutation to remove the N-linked glycosylation site corresponding to position N18 of SEQ ID NO: 1.

[0012] In some embodiments, the mutant soluble ActRIIB-ECD further comprises a substitution of at least one of amino acid residues R3, I6, Y7, Y8, L14, E15, S20, L22, R24, E26, E28, Q29, L33, L48, Y36, S38, R40, S42, T45, K51, F58, Q64, E65, A68, T69, E70, E71, N72, Q74, F84, R88, T90, H91, L92, E94, A95, G96, G97, P98, E99, V100, Y102, E103, P105, P106, T107, A108, or T110 of SEQ ID NO: 1 with another amino acid. In some embodiments, the mutant soluble ActRIIB-ECD comprises an amino acid sequence at least 95% identical to an amino acid sequence selected from the group consisting of SEQ ID NOs: 1, 3-37, 51-117, 327, 330, and 333, wherein the asparagine at position N18 is substituted with another amino acid. In some embodiments, the mutant soluble ActRIIB-ECD comprises an amino acid sequence selected from the group consisting of SEQ ID NOs: 1, 3-37, 51-117, 327, 330, and 333, wherein the asparagine at position N18 is substituted with another amino acid. In some embodiments, the serine at position S20 of SEQ ID NO: 1 is substituted with an amino acid that is not serine(S) or threonine (T). In some embodiments, the asparagine at position N18 is substituted with glutamine (Q).

[0013] In some embodiments, the mutant soluble ActRIIB-ECD comprises an amino acid sequence selected from the group consisting of SEQ ID NOs: 119, 120-221, 329, 332, and 335. In some embodiments, the mutant soluble ActRIIB-ECD comprises an amino acid sequence selected from the group consisting of SEQ ID NOs: 336-354. In some embodiments, the mutant soluble ActRIIB-ECD comprises an amino acid sequence selected from the group consisting of SEQ ID NOs: 355-372. In some embodiments, the mutant soluble ActRIIB-ECD demonstrates increased binding of myostatin relative to an otherwise identical soluble ActRIIB-ECD that includes the N-linked glycosylation site corresponding to position N18 of SEQ ID NO: 1. In some embodiments, the mutant soluble ActRIIB-ECD is glycosylated at an asparagine residue corresponding to position N41 of SEQ ID NO: 1.

[0014] In some embodiments, the glycosylated mutant soluble ActRIIB-ECD or ActRIIA-ECD is sialylated. In some embodiments, a sample of the mutant soluble ActRIIB-ECD comprises at least 40% sialylated glycans. In some embodiments, a sample of the mutant soluble ActRII-ECD comprises at least 60% sialylated glycans. In some embodiments, a sample of the mutant soluble ActRII-ECD comprises at least 5%, 10%, 20%, 30%, 40%, 50%, 60%, 70%, 80%, or 90% sialylated glycans at the position corresponding to N41 of SEQ ID NO: 1. In some embodiments, a sample of the mutant soluble ActRII-ECD comprises at least 40%, 45%, 50%, 55%, 60%, 65%, 70%, 75%, 80%, 90% or more sialylated glycans at the position corresponding to N41 of SEQ ID NO: 1.

[0015] In some embodiments, the mutant soluble ActRII-ECD is fused to at least one heterologous protein. In some embodiments, the heterologous protein comprises a constant domain of an immunoglobulin. In some embodiments, the heterologous protein comprises an Fc domain of an immunoglobulin. In some embodiments, the Fc domain is selected from the group consisting of the Fc domain of a human immunoglobulin gamma-1 (IgG1), the Fc domain of a human immunoglobulin gamma-2 (IgG2), and the Fc domain of a human immunoglobulin gamma-4 (IgG4). In some embodiments, the mutant soluble ActRIIB-ECD is fused to the heterologous protein by a peptide linker sequence. In some embodiments, the heterologous protein comprises a human Fc domain comprising an amino acid sequence selected from the group consisting of: SEQ ID NO: 39, SEQ ID NO: 41, and SEQ ID NO: 43.

[0016] In some embodiments, the isolated protein comprises a linker comprising the amino acid sequence set forth in SEQ ID NO: 44 between the mutant soluble ActRII-ECD and the heterologous protein. In some embodiments, the isolated protein comprises a hinge linker comprising the amino acid sequence set forth in SEQ ID NO: 118 between the mutant soluble ActRII-ECD and the heterologous protein. In some embodiments, the isolated protein comprises a linker comprising the amino acid sequence set forth in SEQ ID NO: 44 and a hinge linker comprising the amino acid sequence set forth in SEQ ID NO: 118 between the mutant soluble ActRII-ECD and the heterologous protein.

[0017] In some embodiments, the isolated protein comprises, in an N-terminal to C-terminal direction, the mutant soluble ActRIIECD, the linker of SEQ ID NO: 44, the hinge linker of SEQ ID NO: 118, and the heterologous protein. In some embodiments, the mutant soluble ActRIIB-ECD comprises an amino acid sequence selected from the group consisting of SEQ ID NOs: 119, 120-221, 329, 332,335, 336-354 and 355-372, and wherein the heterologous protein is selected from the group consisting of the Fc domain of a human immunoglobulin gamma-1 (IgG1), the Fc domain of a human immunoglobulin gamma-2 (IgG2), and the Fc domain of a human immunoglobulin gamma-4 (IgG4). In some embodiments, the mutant soluble ActRIIB-ECD comprises SEQ ID NO: 146 and the heterologous protein comprises the Fc domain of a human IgG4. In some embodiments, the isolated protein comprises SEQ ID NO: 222. In some embodiments, the isolated protein consists of SEQ ID NO: 222. In some embodiments, the isolated protein is glycosylated at an asparagine residue in the mutant soluble ActRII-ECD corresponding to positions N41 of SEQ ID NO: 1 and/or an asparagine residue in the Fc domain corresponding to position N67 of SEQ ID NO: 43. In some embodiments, a sample of the mutant soluble ActRII-ECD comprises at least 40% sialylated glycans. In some embodiments, a sample of the mutant soluble ActRII-ECD comprises at least 40% sialylated glycans at the position corresponding to N41 of SEQ ID NO: 1. In some embodiments, a sample of the mutant soluble ActRII-ECD comprises at least 60% sialylated glycans at the position corresponding to N41 of SEQ ID NO: 1.

[0018] In another aspect, the present disclosure provides a pharmaceutical composition comprising a therapeutically effective amount of the isolated protein herein in admixture with a pharmaceutically acceptable carrier. In some embodiments, the pharmaceutical composition is formulated for administration by a route selected from the group consisting of: subcutaneous, intramuscular, intravenous, and intrathecal administration. In some embodiments, the pharmaceutical composition further comprises a second agent, wherein the second agent is selected from the group consisting of: growth hormone, ghrelin, IGF1, insulin, prednisone, corticosteroid therapy, androgen-deprivation therapy, anabolic steroids, an antagonist of angiotensin or angiotensin receptor, an antagonist of an inflammatory cytokine such as TNF-alpha, IL-6, IL-1 or their receptors, an antagonist of myostatin, activin A or another member of the TGF-beta family or their receptors (for example and without limitation, an anti-myostatin antibody, an anti-activin antibody), bisphosphonates, RANKL inhibitors, agonists of peroxisome proliferator-activated receptors, β2 agonists, activator of PGC-1alpha, proteasome inhibitors, a cancer therapeutic, a chemotherapeutic agent, a cell therapy, a stem cell therapy, gene therapy, gene targeting therapy, and an antisense oligonucleotide. In some embodiments, the pharmaceutical composition comprises a plurality of the isolated proteins and at least 40% of the isolated proteins are sialylated. In another aspect, the present disclosure provides a sample comprising a plurality of the isolated proteins herein, wherein at least 40% of the isolated proteins are sialylated. In another aspect, a sample of the mutant soluble ActRII-ECD comprises at least 5%, 10%, 20%, 30%, 40%, 50%, 60%, 70%, 80%, or 90% sialylated glycans at the position corresponding to N41 of SEQ ID NO: 1. In another aspect, the present disclosure provides a sample comprising a plurality of the isolated proteins herein, wherein at least 40%, 45%, 50%, 55%, 60%, 65%, 70%, 75%, 80%, 90% or more of the isolated proteins are sialylated at the position corresponding to N41 of SEQ ID NO: 1.

[0019] In another aspect, the present disclosure provides a method of treating a myostatin-related or activin A-related disorder in a subject in need thereof, comprising administering a therapeutically effective amount of the pharmaceutical composition herein to the subject. In some embodiments, the myostatin-related or activin A-related disorder is selected from the group consisting of muscle wasting, a bone disorder, a metabolic disorder, and anemia. In some embodiments, the muscle wasting is associate with a condition selected from the group consisting of: muscular dystrophy, myositis, myopathy, motorneuron disease, muscle atrophy, amyotrophic lateral sclerosis, spinal muscular atrophy, neuromuscular junction disease, peripheral nerve disease, spinal cord injury, stroke, neurodegenerative disease, anorexia, cancer, organ failure, trauma, disuse, infection, chronic obstructive pulmonary disease (COPD), sarcopenia, sarcopenic obesity, osteroarthritis, androgen deprivation, emphysema, cystic fibrosis, chronic heart failure, cardiac atrophy, cancer cachexia, renal failure, uremia, protein energy wasting, anorexia, malnutrition, sarcopenia, Acquired Immunodeficiency Syndrome (AIDS), sepsis, burn injury, diabetes, carpal tunnel syndrome, prolonged bed rest, bone fracture, aging, and exposure to microgravity. In some embodiments, the spinal muscular atrophy is selected from the group consisting of infantile progressive spinal muscular atrophy, intermediate spinal muscular atrophy, juvenile spinal muscular atrophy and adult spinal muscular atrophy. In some embodiments, the peripheral nerve disease is selected from the group consisting of Charcot-Marie Tooth disease, Dejerine-Sottas disease and Friedreich's ataxia. In some embodiments, the neurodegenerative disease is selected from the group consisting of Parkinson's disease, Huntington's disease, Alzheimer's disease and Creutzfeldt-Jakob disease. In some embodiments, the aging condition is selected from the group consisting of: frailty of the elderly, age-related sarcopenia, and osteoarthritis. In some embodiments, the motorneuron disease is amyotrophic lateral sclerosis. In some embodiments, the myopathy is critical illness myopathy. In some embodiments, the muscular dystrophy is myotonic dystrophy type 1 (DM1), Facioscapulohumeral muscular dystrophy (FSHD), Limb-girdle muscular dystrophies (LGMD), or Duchenne muscular dystrophy (DMD). In some embodiments, the bone disorder is selected from the group consisting of: osteoporosis, renal osteodystrophy, osteomalacia, osteogenesis imperfecta, fibrodysplasia ossificans progressiva, corticosteroid-induced bone loss, androgen-deprivation therapy-induced bone loss, bone fracture, cancer-induced bone loss, bone metastasis, Paget's disease of the bone, Rickets, Perthes' disease and fibrous dysplasia.

[0020] In some embodiments, the method further comprises administering a second agent to the subject in need thereof, wherein the second agent is administered prior to, concurrently with, or subsequent to administration of the pharmaceutical composition.

[0021] In another aspect, the present disclosure provides a polynucleotide encoding a protein comprising: a mutant soluble ActRIIB-ECD sequence selected from the group consisting of SEQ ID NOs: 119, 120-221, 329, 332, and 335, 336-354, and 355-372, and an Fc domain sequence of a human IgG. In some embodiments, the protein encoded by the polynucleotide further comprises: the peptide linker sequence of SEQ ID NO: 44; the hinge linker sequence of SEQ ID NO: 118; or both the peptide linker sequence of SEQ ID NO: 44 and the hinge linker sequence of SEQ ID NO: 118. In some embodiments, the polynucleotide further comprises a signal peptide sequence.

[0022] In another aspect, the present disclosure provides a polynucleotide comprising a DNA sequence of SEQ ID NO: 1653. In another aspect, the present disclosure provides a vector comprising the polynucleotide herein. In another aspect, the present disclosure provides a host cell comprising the polynucleotide herein. In some embodiments, the host cell is a mammalian cell.

[0023] In another aspect, the present disclosure provides a method of producing a protein comprising a mutant soluble ActRII-ECD comprising culturing the host cell herein under conditions promoting the expression of the protein, and recovering the protein. In some embodiments, the method further comprises purifying the protein using one or more of Protein A chromatography, size exclusion chromatography, or ion exchange chromatography.

[0024] In another aspect, the present disclosure provides a method of selecting a preferred host cell for the expression of a soluble ActRII-ECD protein, the method comprising inserting a polynucleotide encoding a soluble ActRII-ECD protein that comprises an N-linked glycosylation site at the position corresponding to N18 of SEQ ID NO: 1 into a candidate host cell, culturing the host cell under conditions promoting the expression of the protein, recovering the protein, and measuring the percentage of ActRII-ECD proteins that are aglycosylated at the N18 position. The method further comprises selecting a host cell line for production of a soluble ActRII-ECD protein if the host cell line produces ActRIIB-ECD proteins wherein at least 20%, 25%, 30%, 35%, 40%, 45%, 50%, 55%, 60%, 65%, 70%, 75%, 80%, 85%, 90% or more of the ActRII-ECD proteins in the sample are aglycosylated at the N-linked glycosylation site corresponding to position N18 of SEQ ID NO: 1. The method may further comprise measuring the percentage of ActRII-ECD proteins that are sialylated at the N-linked glycosylation site corresponding to position N41 of SEQ ID NO: 1, and selecting a host cell line that produces a relatively high percentage of sialylated ActRII proteins at that position (e.g., wherein at least 60%, 70%, 80%, 85%, 90% or more of the ActRII proteins in a sample are sialylated at the position corresponding to N41 of SEQ ID NO: 1)

[0025] These and other aspects, objects, features, and advantages of the example embodiments will become apparent to those having ordinary skill in the art upon consideration of the following detailed description of illustrated example embodiments.

### BRIEF DESCRIPTION OF THE DRAWINGS

[0026] An understanding of the features and advantages of the present invention will be obtained by reference to the following detailed description that sets forth illustrative embodiments, in which the principles of the invention may be utilized, and the accompanying drawings of which:

[0027] FIG. 1 shows an ActRIIB/GDF11/ALK5 complex modeled with biantennary glycan, which reveals a clash (dotted oval) in binding the ligands due to N18 glycans.

[0028] FIG. 2A shows a dimer of two fusion proteins, each comprising a soluble ActRII-ECD (200) and a Fc domain (201). Each of the fusion proteins has three N-linked glycosylation sites, at N18, N41, and N194, and O-linked glycosylation sites (202). The two fusion proteins are connected via disulfide bonds (203). Multiple exemplary sequences of fusion proteins having this structure are described herein, including but not limited to SEQ ID NO: 376. FIG. 2B shows a dimer of two fusion proteins, each comprising a mutant soluble ActRII-ECD (204) and a Fc domain (201). The mutant soluble ActRII-ECD has a N18Q mutation. The fusion protein has two N-linked glycosylation sites, at N41, and N194, and an O-linked glycosylation region (202). The two fusion proteins are connected via disulfide bonds (203). Multiple exemplary sequences of fusion proteins having this structure are described herein, including but not limited to SEQ ID NO: 222.

[0029] FIG. 3A shows myostatin (300) bound to monomeric truncated ActRIIB-ECD receptor protein (301). The N-linked glycosylation sites at N18 and N41 are distal from the binding site of myostatin on the truncated ActRIIB-ECD receptor protein. FIG. 3B shows growth differentiation factor 11 (GDF11) (302) bound to monomeric truncated ActRIIB-ECD receptor protein (301). The N-linked glycosylation sites at N18 and N41 are distal from the binding site of GDF11 on the truncated ActRIIB-ECD receptor protein.

[0030] FIG. 4 shows SDS-PAGE analysis of the fractions during purification of a fusion protein comprising an exemplary mutant soluble ActRIIB-ECD.

[0031] FIG. 5A shows ActRIIA-ECD receptor protein (orange/dark gray) aligned to ActRIIB-ECD receptor protein (cyan/light gray). The N-linked glycosylation sites at positions N18 and N41 are structurally conserved. FIG. 5B shows sequence alignment of ActRIIB-ECD with ActRIIA-ECD. The N-linked glycosylation sites at N24 and N47 (gray boxes) of the full length ActRIIA-ECD and ActRIIB-ECD correspond to positions N18 and N41, respectively, in truncated ActRIIB-ECD (SEQ ID NO: 1) and truncated ActRIIA-ECD (SEQ ID NO: 1635). The N-linked glycosylation sites at positions N18 and N41 are conserved between ActRIIA-ECD and ActRIIB-ECD. 53.8% identity is shown. The aligned sequences are: Hu ActRIIB: uniprot/Q13705 and Hu ActRIIA: uniprot/P27037.

[0032] The figures herein are for illustrative purposes only and are not necessarily drawn to scale.

### DETAILED DESCRIPTION

[0033] The present disclosure provides for isolated proteins comprising a modified activin II receptor (ActRIIA or ActRIIB) or a fragment thereof that has improved binding to a binding partner (e.g., myostatin and/or activin) compared to a reference ActRII (ActRIIA or ActRIIB) without the modification. In some aspects, the modified ActRIIA or ActRIIB may include one or more mutations that remove a glycosylation site (e.g., an N-linked glycosylation site). Removal of the glycosylation site may facilitate the binding of the ActRIIA or ActRIIB with its binding partner. The glycosylation on other glycosylation site(s) that are not removed by the mutation(s) may be retained.

[0034] The inventors have surprisingly discovered that selective removal of a glycosylation site (e.g, the glycosylation site corresponding to position N18 of SEQ ID NO: 1) may improve binding of ActRIIB ligands (e.g., activin, myostatin, BMP9) to the ActRIIB receptor. This discovery is particularly surprising because the sites on ActRIIB for binding to its ligands (e.g., myostatin and GDF11) are distal to the glycosylation sites (see FIGS. 3A and 3B).

[0035] In some embodiments, the isolated protein comprising the modified ActRIIA or ActRIIB may exhibit better potency in treating a myostatin-related or activin A-related disorders in a subject (e.g., severe muscle loss, cachexia, and a wide range of chronic catabolic diseases that involve muscle atrophy, bone loss, inflammation, and fibrosis). In some embodiments, the isolated protein with the mutant ActRIIA or ActRIIB may have a similar or increased level of other desired features such as stability compared to the reference protein.

[0036] In one aspect, the isolated protein provided in the present disclosure may include a mutant soluble ActRIIB extracellular domain (ActRIIB-ECD). The mutant may comprise one or more mutations at the N-linked glycosylation site corresponding to position N18 of wild type human soluble ActRIIB-ECD (SEQ ID NO: 1). In some embodiments, the mutant soluble ActRIIB-ECD may comprise additional mutation(s) for functions other than the modification of glycosylation site.

[0037] In some embodiments, the isolated protein may be a fusion protein comprising the mutant soluble ActRIIA-ECD or ActRIIB-ECD fused with a heterologous protein, e.g., an Fc domain of an immunoglobulin. The heterologous protein may be attached to the mutant soluble ActRIIA-ECD or ActRIIB-ECD via one or more linkers. In some embodiments, the isolated protein may be in the form of a dimer, e.g., through the dimerization of the heterologous protein. The inventors have surprisingly discovered that glycosylation (including sialylation) at N18 of the ActRIIB-ECD of such a dimerized fusion protein may allow only one of the two ActRIIB-ECDs to bind to ligand, i.e., monovalent binding. This may be due to steric clashing in which N18 glycans prevent binding of two copies of ligand to such a dimer (see, e.g., FIG. 1). This may lead to lower affinity for the ligand, which in turn leads to lower potency of the ActRII-ECD fusion protein. As discussed above, this discovery is particularly surprising because the ligand binding site on monomeric ActRIIB-ECD is distal to the glycosylation sites and in such a structure, the glycans do not interfere with binding of ligand (e.g., myostatin, activin, GDF11, etc.) (see FIGS. 3A and 3B). Without wishing to be bound by theory, it is believed that bivalent binding (as opposed to monovalent binding) results in higher affinity of the fusion protein for its ligand(s), which in turn leads to higher potency of the fusion protein. Accordingly, in some aspects, removal of a glycosylation site in a mutant soluble ActRII-ECD-Fc fusion protein may facilitate the binding of the ActRII with its binding partner (e.g., myostatin or activin) in the context of the dimerized fusion protein. Provided herein are compositions comprising ActRII-ECD-Fc fusion proteins that have lower (e.g., no) glycosylation (e.g., also sialylation) at the asparagine residue corresponding to position N18 of SEQ ID NO: 1 in any of the ActRII-ECD described herein or known in the art, and methods associated with such compositions.

[0038] Additionally, it is also believed that increased overall sialylation of protein therapeutics such as the modified ActRIIA-ECD or ActRIIB-ECD polypeptides described herein can lead to higher half-life of the molecule in a subject. Higher half-lives are a desirable attribute of a therapeutic. However, as described above, sialylation at the N18 position surprisingly leads to steric clashing (see, e.g., FIG. 1) that can decrease affinity/potency of ActRII molecules described herein. The inventors have surprisingly figured out a way to balance these two challenges. The modified ActRII polypeptides described herein may advantageously remove the source of steric clashing at N18 specifically (thereby increasing affinity/potency) while not interfering with the overall sialylation on the rest of the molecule (thereby preserving the half-life of the molecule). As such, provided herein are compositions that comprise a certain desired (e.g., high) level of sialylation without that sialylation being at the N18 site. Also provided herein are methods of making such compositions. For example, the compositions and methods described herein permit the tuning of sialylation to a desirable level without negatively impacting the ability of the fusion proteins to bind the desired ligands (e.g., myostatin, activin, GDF11).

[0039] Also provided herein are related compositions, kits, nucleic acids, vectors, and recombinant cells, as well as related methods, including methods of using and methods of producing any of the proteins described herein.

[0040] In another aspect, the present disclosure provides a method of selecting a preferred host cell for the expression of an ActRIIB or ActRIIA protein. The selection method comprises inserting a polynucleotide encoding an ActRII protein that comprises an N-linked glycosylation site at the position corresponding to N18 of SEQ ID NO: 1 into a candidate host cell that is capable of glycosylating proteins (e.g., a mammalian cell such as a human endothelial kidney 293 (HEK293) cell, baby hamster kidney (BHK) cell, Sp2/0 hybridoma mouse cell, Chinese hamster ovary (CHO) cell, HT-1080 human cell, or a non-mammalian cell (such as yeast) that produces glycosylated proteins). The host cell is cultured under conditions promoting the expression of the protein, the protein is recovered, and the percentage of ActRII-ECD proteins that are aglycosylated at the N18 position is measured. The host cell line is selected for production of a soluble ActRII-ECD protein if at least 20%, 25%, 30%, 35%, 40%, 45%, 50%, 55%, 60%, 65%, 70%, 75%, 80%, 85%, 90% or more of the ActRII-ECD proteins are aglycosylated at the N-linked glycosylation site corresponding to position N18 of SEQ ID NO: 1. The method may further comprise selecting a host cell line for production of an ActRII protein based on further criteria in addition to aglycosylation at the N18 position, including preferably selecting a host cell line that additionally produces a relatively high percentage of sialylated ActRII proteins at the position corresponding to N41 of SEQ ID NO: 1 (e.g., wherein at least 60%, 70%, 80%, 85%, 90% or more of the ActRII proteins in a sample are sialylated at the position corresponding to N41 of SEQ ID NO: 1).

### Definitions

[0041] The terms “polypeptide”, “peptide” and “protein” are used interchangeably herein to refer to a polymer of amino acid residues. In various embodiments, “peptides”, “polypeptides”, and “proteins” are chains of amino acids whose alpha carbons are linked through peptide bonds. The terminal amino acid at one end of the chain (amino terminal) therefore has a free amino group, while the terminal amino acid at the other end of the chain (carboxy terminal) has a free carboxyl group. As used herein, the term “amino terminus” (abbreviated N-terminus) refers to the free a-amino group on an amino acid at the amino terminal of a peptide or to the α-amino group (imino group when participating in a peptide bond) of an amino acid at any other location within the peptide. Similarly, the term “carboxy terminus” refers to the free carboxyl group on the carboxy terminus of a peptide or the carboxyl group of an amino acid at any other location within the peptide. Peptides also include essentially any polyamino acid including, but not limited to, peptide mimetics such as amino acids joined by an ether as opposed to an amide bond

[0042] Polypeptides of the disclosure include polypeptides that have been modified in any way and for any reason, for example, to: (1) reduce susceptibility to proteolysis, (2) reduce susceptibility to oxidation, (3) alter binding affinity for forming protein complexes, (4) alter binding affinities, and (5) confer or modify other physicochemical or functional properties. For example, single or multiple amino acid substitutions (e.g., conservative amino acid substitutions) may be made in the naturally occurring sequence (e.g., in the portion of the polypeptide outside the domain(s) forming intermolecular contacts). A “conservative amino acid substitution” refers to the substitution in a polypeptide of an amino acid with a functionally similar amino acid. The following six groups each contain amino acids that are conservative substitutions for one another:
[0043] 1) Alanine (A), Serine(S), and Threonine (T)
[0044] 2) Aspartic acid (D) and Glutamic acid (E)
[0045] 3) Asparagine (N) and Glutamine (Q)
[0046] 4) Arginine (R) and Lysine (K)
[0047] 5) Isoleucine (I), Leucine (L), Methionine (M), and Valine (V)
[0048] 6) Phenylalanine (F), Tyrosine (Y), and Tryptophan (W)

[0049] A “non-conservative amino acid substitution” refers to the substitution of a member of one of these classes for a member from another class. In making such changes, according to various embodiments, the hydropathic index of amino acids may be considered. Each amino acid has been assigned a hydropathic index on the basis of its hydrophobicity and charge characteristics. They are: isoleucine (+4.5); valine (+4.2); leucine (+3.8); phenylalanine (+2.8); cysteine/cystine (+2.5); methionine (+1.9); alanine (+1.8); glycine (−0.4); threonine (−0.7); serine (−0.8); tryptophan (−0.9); tyrosine (−1.3); proline (−1.6); histidine (−3.2); glutamate (−3.5); glutamine (−3.5); aspartate (−3.5); asparagine (−3.5); lysine (−3.9); and arginine (−4.5).

[0050] The importance of the hydropathic amino acid index in conferring interactive biological function on a protein is understood in the art (see, for example, Kyte et al., 1982, J. Mol. Biol. 157:105-131). It is known that certain amino acids may be substituted for other amino acids having a similar hydropathic index or score and still retain a similar biological activity. In making changes based upon the hydropathic index, in various embodiments, the substitution of amino acids whose hydropathic indices are within ±2 is included. In various embodiments, those that are within ±1 are included, and in various embodiments, those within ±0.5 are included.

[0051] It is also understood in the art that the substitution of like amino acids can be made effectively on the basis of hydrophilicity, particularly where the biologically functional protein or peptide thereby created is intended for use in immunological embodiments, as disclosed herein. In various embodiments, the greatest local average hydrophilicity of a protein, as governed by the hydrophilicity of its adjacent amino acids, correlates with its immunogenicity and antigenicity, i.e., with a biological property of the protein.

[0052] The following hydrophilicity values have been assigned to these amino acid residues: arginine (+3.0); lysine (+3.0); aspartate (+3.0.+−. 1); glutamate (+3.0.+−. 1); serine (+0.3); asparagine (+0.2); glutamine (+0.2); glycine (0); threonine (−0.4); proline (−0.5.+−. 1); alanine (−0.5); histidine (−0.5); cysteine (−1.0); methionine (−1.3); valine (−1.5); leucine (−1.8); isoleucine (−1.8); tyrosine (−2.3); phenylalanine (−2.5) and tryptophan (−3.4). In making changes based upon similar hydrophilicity values, in various embodiments, the substitution of amino acids whose hydrophilicity values are within #2 is included, in various embodiments, those that are within #1 are included, and in various embodiments, those within #0.5 are included.

[0053] Exemplary amino acid substitutions are set forth in Table 1.

TABLE 1

| Original Residues | Exemplary Substitutions | Preferred Substitutions |
|---|---|---|
| Ala | Val, Leu, Ile | Val |
| Arg | Lys, Gln, Asn | Lys |
| Asn | Gln | |
| Asp | Glu | |
| Cys | Ser, Ala | Ser |
| Gln | Asn | Asn |
| Glu | Asp | Asp |
| Gly | Pro, Ala | Ala |
| His | Asn, Gln, Lys, Arg | Arg |
| Ile | Leu, Val, Met, Ala, | Leu |
| | Phe, Norleucine | |
| Leu | Norleucine, Ile, | Ile |
| | Val, Met, Ala, Phe | |
| Lys | Arg, 1,4 Diamino-butyric | Arg |
| | Acid, Gln, Asn | |
| Met | Leu, Phe, Ile | Leu |
| Phe | Leu, Val, Ile, Ala, Tyr | Leu |
| Pro | Ala | Gly |
| Ser | Thr, Ala, Cys | Thr |
| Thr | Ser | |
| Trp | Tyr, Phe | Tyr |
| Tyr | Trp, Phe, Thr, Ser | Phe |
| Val | Ile, Met, Leu, Phe, | Leu |
| | Ala, Norleucine | |

[0054] A skilled artisan will be able to determine suitable variants of polypeptides as set forth herein using well-known techniques. In various embodiments, one skilled in the art may identify suitable areas of the molecule that may be changed without destroying activity by targeting regions not believed to be important for activity. In other embodiments, the skilled artisan can identify residues and portions of the molecules that are conserved among similar polypeptides. In further embodiments, even areas that may be important for biological activity or for structure may be subject to conservative amino acid substitutions without destroying the biological activity or without adversely affecting the polypeptide structure.

[0055] Additionally, one skilled in the art can review structure-function studies identifying residues in similar polypeptides that are important for activity or structure. In view of such a comparison, the skilled artisan can predict the importance of amino acid residues in a polypeptide that correspond to amino acid residues important for activity or structure in similar polypeptides. One skilled in the art may opt for chemically similar amino acid substitutions for such predicted important amino acid residues.

[0056] One skilled in the art can also analyze the three-dimensional structure and amino acid sequence in relation to that structure in similar polypeptides. In view of such information, one skilled in the art may predict the alignment of amino acid residues of a polypeptide with respect to its three-dimensional structure. In various embodiments, one skilled in the art may choose to not make radical changes to amino acid residues predicted to be on the surface of the polypeptide, since such residues may be involved in important interactions with other molecules. Moreover, one skilled in the art may generate test variants containing a single amino acid substitution at each desired amino acid residue. The variants can then be screened using activity assays known to those skilled in the art. Such variants could be used to gather information about suitable variants. For example, if one discovered that a change to a particular amino acid residue resulted in destroyed, undesirably reduced, or unsuitable activity, variants with such a change can be avoided. In other words, based on information gathered from such routine experiments, one skilled in the art can readily determine the amino acids where further substitutions should be avoided either alone or in combination with other mutations.

[0057] The terms “polypeptide fragment” and “truncated polypeptide” as used herein refer to a polypeptide that has an amino-terminal and/or carboxy-terminal deletion as compared to a corresponding full-length protein. In certain embodiments, fragments can be, e.g., at least 5, at least 10, at least 25, at least 50, at least 100, at least 150, at least 200, at least 250, at least 300, at least 350, at least 400, at least 450, at least 500, at least 600, at least 700, at least 800, at least 900 or at least 1000 amino acids in length. In certain embodiments, fragments can also be, e.g., at most 1000, at most 900, at most 800, at most 700, at most 600, at most 500, at most 450, at most 400, at most 350, at most 300, at most 250, at most 200, at most 150, at most 100, at most 50, at most 25, at most 10, or at most 5 amino acids in length. A fragment can further comprise, at either or both of its ends, one or more additional amino acids, for example, a sequence of amino acids from a different naturally-occurring protein (e.g., an Fc or leucine zipper domain) or an artificial amino acid sequence (e.g., an artificial linker sequence).

[0058] The terms “polypeptide variant” and “polypeptide mutant” as used herein refer to a polypeptide that comprises an amino acid sequence wherein one or more amino acid residues are inserted into, deleted from and/or substituted into the amino acid sequence relative to another polypeptide sequence. In certain embodiments, the number of amino acid residues to be inserted, deleted, or substituted can be, e.g., at least 1, at least 2, at least 3, at least 4, at least 5, at least 10, at least 25, at least 50, at least 75, at least 100, at least 125, at least 150, at least 175, at least 200, at least 225, at least 250, at least 275, at least 300, at least 350, at least 400, at least 450 or at least 500 amino acids in length. Hybrids of the present disclosure include fusion proteins.

[0059] A “derivative” of a polypeptide is a polypeptide that has been chemically modified, e.g., conjugation to another chemical moiety such as, for example, polyethylene glycol, albumin (e.g., human serum albumin), phosphorylation, and glycosylation.

[0060] The term “% sequence identity” is used interchangeably herein with the term “% identity” and refers to the level of amino acid sequence identity between two or more peptide sequences or the level of nucleotide sequence identity between two or more nucleotide sequences, when aligned using a sequence alignment program. For example, as used herein, 80% identity means the same thing as 80% sequence identity determined by a defined algorithm, and means that a given sequence is at least 80% identical to another length of another sequence. In certain embodiments, the % identity is selected from, e.g., at least 60%, at least 65%, at least 70%, at least 75%, at least 80%, at least 85%, at least 90%, at least 95%, or at least 99% or more sequence identity to a given sequence. In certain embodiments, the % identity is in the range of, e.g., about 60% to about 70%, about 70% to about 80%, about 80% to about 85%, about 85% to about 90%, about 90% to about 95%, or about 95% to about 99%.

[0061] The term “% sequence homology” is used interchangeably herein with the term “% homology” and refers to the level of amino acid sequence homology between two or more peptide sequences or the level of nucleotide sequence homology between two or more nucleotide sequences, when aligned using a sequence alignment program. For example, as used herein, 80% homology means the same thing as 80% sequence homology determined by a defined algorithm, and accordingly a homologue of a given sequence has greater than 80% sequence homology over a length of the given sequence. In certain embodiments, the % homology is selected from, e.g., at least 60%, at least 65%, at least 70%, at least 75%, at least 80%, at least 85%, at least 90%, at least 95%, or at least 99% or more sequence homology to a given sequence. In certain embodiments, the % homology is in the range of, e.g., about 60% to about 70%, about 70% to about 80%, about 80% to about 85%, about 85% to about 90%, about 90% to about 95%, or about 95% to about 99%.

[0062] Exemplary computer programs which can be used to determine identity between two sequences include, but are not limited to, the suite of BLAST programs, e.g., BLASTN, BLASTX, and TBLASTX, BLASTP and TBLASTN, publicly available on the Internet at the NCBI website. See also Altschul et al., J. Mol. Biol. 215:403-10, 1990 (with special reference to the published default setting, i.e., parameters w=4, t=17) and Altschul et al., Nucleic Acids Res., 25:3389-3402, 1997. Sequence searches are typically carried out using the BLASTP program when evaluating a given amino acid sequence relative to amino acid sequences in the GenBank Protein Sequences and other public databases. The BLASTX program is preferred for searching nucleic acid sequences that have been translated in all reading frames against amino acid sequences in the GenBank Protein Sequences and other public databases. Both BLASTP and BLASTX are run using default parameters of an open gap penalty of 11.0, and an extended gap penalty of 1.0, and utilize the BLOSUM-62 matrix. See Id.

[0063] In addition to calculating percent sequence identity, the BLAST algorithm also performs a statistical analysis of the similarity between two sequences (see, e.g., Karlin & Altschul, Proc. Nat'l. Acad. Sci. USA, 90:5873-5787, 1993). One measure of similarity provided by the BLAST algorithm is the smallest sum probability (P(N)), which provides an indication of the probability by which a match between two nucleotide or amino acid sequences would occur by chance. For example, a nucleic acid is considered similar to a reference sequence if the smallest sum probability in a comparison of the test nucleic acid to the reference nucleic acid is, e.g., less than about 0.1, less than about 0.01, or less than about 0.001.

[0064] The term “antibody” as used herein refers to a protein comprising one or more polypeptides substantially or partially encoded by immunoglobulin genes or fragments of immunoglobulin genes and having specificity to a tumor antigen or specificity to a molecule overexpressed in a pathological state. The recognized immunoglobulin genes include the kappa, lambda, alpha, gamma, delta, epsilon and mu constant region genes, as well as subtypes of these genes and myriad of immunoglobulin variable region genes. Light chains (LC) are classified as either kappa or lambda. Heavy chains (HC) are classified as gamma, mu, alpha, delta, or epsilon, which in turn define the immunoglobulin classes, IgG, IgM, IgA, IgD and IgE, respectively. A typical immunoglobulin (e.g., antibody) structural unit comprises a tetramer. Each tetramer is composed of two identical pairs of polypeptide chains, each pair having one “light” (about 25 kD) and one “heavy” chain (about 50-70 kD). The N-terminus of each chain defines a variable region of about 100 to 110 or more amino acids primarily responsible for antigen recognition.

[0065] The term “Fc region” or “Fc domain” as used herein defines the C-terminal region of an immunoglobulin heavy chain, which may be generated by papain digestion of an intact antibody. The Fc region may be a native sequence Fc region or a variant Fc region. The Fc region of an immunoglobulin generally comprises two constant domains, a C_{H2} domain and a C_{H3} domain, and optionally comprises a C_{H4} domain. The Fc portion of an antibody mediates several important effector functions e.g. cytokine induction, ADCC, phagocytosis, complement dependent cytotoxicity (CDC) and half-life/clearance rate of antibody and antigen-antibody complexes (e.g., the neonatal FcR (FcRn) binds to the Fc region of IgG at acidic pH in the endosome and protects IgG from degradation, thereby contributing to the long serum half-life of IgG). Replacements of amino acid residues in the Fc portion to alter antibody effector function are known in the art (see, e.g., Winter et al., U.S. Pat. Nos. 5,648,260 and 5,624,821).

[0066] “Polynucleotide” refers to a polymer composed of nucleotide units. Polynucleotides include naturally occurring nucleic acids, such as deoxyribonucleic acid (“DNA”) and ribonucleic acid (“RNA”) as well as nucleic acid analogs. Nucleic acid analogs include those which include non-naturally occurring bases, nucleotides that engage in linkages with other nucleotides other than the naturally occurring phosphodiester bond or which include bases attached through linkages other than phosphodiester bonds. Thus, nucleotide analogs include, for example and without limitation, phosphorothioates, phosphorodithioates, phosphorotriesters, phosphoramidates, boranophosphates, methylphosphonates, chiral-methyl phosphonates, 2-O-methyl ribonucleotides, peptide-nucleic acids (PNAs), and the like. Such polynucleotides can be synthesized, for example, using an automated DNA synthesizer. The term “nucleic acid” typically refers to large polynucleotides. The term “oligonucleotide” typically refers to short polynucleotides, generally no greater than about 50 nucleotides. It will be understood that when a nucleotide sequence is represented by a DNA sequence (i.e., A, T, G, C), this also includes an RNA sequence (i.e., A, U, G, C) in which “U” replaces “T.”

[0067] Conventional notation is used herein to describe polynucleotide sequences: the left-hand end of a single-stranded polynucleotide sequence is the 5′-end; the left-hand direction of a double-stranded polynucleotide sequence is referred to as the 5′-direction. The direction of 5′ to 3′ addition of nucleotides to nascent RNA transcripts is referred to as the transcription direction. The DNA strand having the same sequence as an mRNA is referred to as the “coding strand”; sequences on the DNA strand having the same sequence as an mRNA transcribed from that DNA and which are located 5′ to the 5′-end of the RNA transcript are referred to as “upstream sequences”; sequences on the DNA strand having the same sequence as the RNA and which are 3′ to the 3′ end of the coding RNA transcript are referred to as “downstream sequences.”

[0068] “Complementary” refers to the topological compatibility or matching together of interacting surfaces of two polynucleotides. Thus, the two molecules can be described as complementary, and furthermore, the contact surface characteristics are complementary to each other. A first polynucleotide is complementary to a second polynucleotide if the nucleotide sequence of the first polynucleotide is substantially identical to the nucleotide sequence of the polynucleotide binding partner of the second polynucleotide, or if the first polynucleotide can hybridize to the second polynucleotide under stringent hybridization conditions.

[0069] “Probe,” when used in reference to a polynucleotide, refers to a polynucleotide that is capable of specifically hybridizing to a designated sequence of another polynucleotide. A probe specifically hybridizes to a target complementary polynucleotide, but need not reflect the exact complementary sequence of the template. In such a case, specific hybridization of the probe to the target depends on the stringency of the hybridization conditions. Probes can be labeled with, e.g., chromogenic, radioactive, or fluorescent moieties and used as detectable moieties. In instances where a probe provides a point of initiation for synthesis of a complementary polynucleotide, a probe can also be a primer.

[0070] A “vector” is a polynucleotide that can be used to introduce another nucleic acid linked to it into a cell. One type of vector is a “plasmid,” which refers to a linear or circular double stranded DNA molecule into which additional nucleic acid segments can be ligated. Another type of vector is a viral vector (e.g., replication defective retroviruses, adenoviruses and adeno-associated viruses), wherein additional DNA segments can be introduced into the viral genome. Certain vectors are capable of autonomous replication in a host cell into which they are introduced (e.g., bacterial vectors comprising a bacterial origin of replication and episomal mammalian vectors). Other vectors (e.g., non-episomal mammalian vectors) are integrated into the genome of a host cell upon introduction into the host cell, and thereby are replicated along with the host genome.

[0071] A “regulatory sequence” is a nucleic acid that affects the expression (e.g., the level, timing, or location of expression) of a nucleic acid to which it is operably linked. The regulatory sequence can, for example, exert its effects directly on the regulated nucleic acid, or through the action of one or more other molecules (e.g., polypeptides that bind to the regulatory sequence and/or the nucleic acid). Examples of regulatory sequences include promoters, enhancers and other expression control elements (e.g., polyadenylation signals). Further examples of regulatory sequences are described in, for example, Goeddel, 1990, Gene Expression Technology: Methods in Enzymology 185, Academic Press, San Diego, Calif. and Baron et al., 1995, Nucleic Acids Res. 23:3605-06. A nucleotide sequence is “operably linked” to a regulatory sequence if the regulatory sequence affects the expression (e.g., the level, timing, or location of expression) of the nucleotide sequence.

[0072] A “host cell” is a cell that can be used to express a polynucleotide of the disclosure. A host cell can be a prokaryote, for example, E. coli, or it can be a eukaryote, for example, a single-celled eukaryote (e.g., a yeast or other fungus), a plant cell (e.g., a tobacco or tomato plant cell), an animal cell (e.g., a human cell, a monkey cell, a hamster cell, a rat cell, a mouse cell, or an insect cell) or a hybridoma. Typically, a host cell is a cultured cell that can be transformed or transfected with a polypeptide-encoding nucleic acid, which can then be expressed in the host cell. The phrase “recombinant host cell” can be used to denote a host cell that has been transformed or transfected with a nucleic acid to be expressed. A host cell also can be a cell that comprises the nucleic acid but does not express it at a desired level unless a regulatory sequence is introduced into the host cell such that it becomes operably linked with the nucleic acid. It is understood that the term host cell refers not only to the particular subject cell but also to the progeny or potential progeny of such a cell. Because certain modifications may occur in succeeding generations due to, e.g., mutation or environmental influence, such progeny may not, in fact, be identical to the parent cell, but are still included within the scope of the term as used herein.

[0073] The term “isolated molecule” (where the molecule is, for example, a protein or a polynucleotide) is a molecule that by virtue of its origin or source of derivation (1) is not associated with naturally associated components that accompany it in its native state, (2) is substantially free of other molecules from the same species (3) is expressed by a cell from a different species, or (4) does not occur in nature. Thus, a molecule that is chemically synthesized, or expressed in a cellular system different from the cell from which it naturally originates, will be “isolated” from its naturally associated components. A molecule also may be rendered substantially free of naturally associated components by isolation, using purification techniques well known in the art. Molecule purity or homogeneity may be assayed by a number of means well known in the art. For example, the purity of a polypeptide sample may be assayed using polyacrylamide gel electrophoresis and staining of the gel to visualize the polypeptide using techniques well known in the art. For certain purposes, higher resolution may be provided by using HPLC or other means well known in the art for purification.

[0074] A protein or polypeptide is “substantially pure,” “substantially homogeneous,” or “substantially purified” when at least about 60% to 75% of a sample exhibits a single species of polypeptide. The polypeptide or protein may be monomeric or multimeric. A substantially pure polypeptide or protein will typically comprise about 50%, 60%, 70%, 80% or 90% W/W of a protein sample, more usually about 95%, and preferably will be over 99% pure. Protein purity or homogeneity may be indicated by a number of means well known in the art, such as polyacrylamide gel electrophoresis of a protein sample, followed by visualizing a single polypeptide band upon staining the gel with a stain well known in the art. For certain purposes, higher resolution may be provided by using HPLC or other means well known in the art for purification.

[0075] “Linker” refers to a molecule that joins two other molecules, either covalently, or through ionic, van der Waals or hydrogen bonds, e.g., a nucleic acid molecule that hybridizes to one complementary sequence at the 5′ end and to another complementary sequence at the 3′ end, thus joining two non-complementary sequences. A “cleavable linker” refers to a linker that can be degraded or otherwise severed to separate the two components connected by the cleavable linker. Cleavable linkers are generally cleaved by enzymes, typically peptidases, proteases, nucleases, lipases, and the like. Cleavable linkers may also be cleaved by environmental cues, such as, for example, changes in temperature, pH, salt concentration, etc.

[0076] The terms “label” or “labeled” as used herein refers to incorporation of another molecule in the antibody. In one embodiment, the label is a detectable marker, e.g., incorporation of a radiolabeled amino acid or attachment to a polypeptide of biotinyl moieties that can be detected by marked avidin (e.g., streptavidin containing a fluorescent marker or enzymatic activity that can be detected by optical or calorimetric methods). In another embodiment, the label or marker can be therapeutic, e.g., a drug conjugate or toxin. Various methods of labeling polypeptides and glycoproteins are known in the art and may be used. Examples of labels for polypeptides include, but are not limited to, the following: radioisotopes or radionuclides (e.g., ³H, ¹⁴C, ¹⁵N, ³⁵S, ⁹⁰Y, ⁹⁹Tc, ¹¹¹In, ¹²⁵I, ¹³¹I), fluorescent labels (e.g., FITC, rhodamine, lanthanide phosphors), enzymatic labels (e.g., horseradish peroxidase, β-galactosidase, luciferase, alkaline phosphatase), chemiluminescent markers, biotinyl groups, predetermined polypeptide epitopes recognized by a secondary reporter (e.g., leucine zipper pair sequences, binding sites for secondary antibodies, metal binding domains, epitope tags), magnetic agents, such as gadolinium chelates, toxins such as pertussis toxin, taxol, cytochalasin β, gramicidin D, ethidium bromide, emetine, mitomycin, etoposide, tenoposide, vincristine, vinblastine, colchicine, doxorubicin, daunorubicin, dihydroxy anthracin dione, mitoxantrone, mithramycin, actinomycin D, 1-dehydrotestosterone, glucocorticoids, procaine, tetracaine, lidocaine, propranolol, and puromycin and analogs or homologs thereof. In some embodiments, labels are attached by spacer arms of various lengths to reduce potential steric hindrance.

[0077] “Pharmaceutical composition” refers to a composition suitable for pharmaceutical use in an animal. A pharmaceutical composition comprises a pharmacologically effective amount of an active agent and a pharmaceutically acceptable carrier. “Pharmacologically effective amount” refers to that amount of an agent effective to produce the intended pharmacological result. “Pharmaceutically acceptable carrier” refers to any of the standard pharmaceutical carriers, vehicles, buffers, and excipients, such as a phosphate buffered saline solution, 5% aqueous solution of dextrose, and emulsions, such as an oil/water or water/oil emulsion, and various types of wetting agents and/or adjuvants. Suitable pharmaceutical carriers and formulations are described in Remington's Pharmaceutical Sciences, 21st Ed. 2005, Mack Publishing Co, Easton. A “pharmaceutically acceptable salt” is a salt that can be formulated into a compound for pharmaceutical use including, e.g., metal salts (sodium, potassium, magnesium, calcium, etc.) and salts of ammonia or organic amines.

[0078] The terms “treat”, “treating” and “treatment” refer to a method of alleviating or abrogating a biological disorder and/or at least one of its attendant symptoms. As used herein, to “alleviate” a disease, disorder or condition means reducing the severity and/or occurrence frequency of the symptoms of the disease, disorder, or condition. Further, references herein to “treatment” include references to curative, palliative and prophylactic treatment.

[0079] It is understood that aspect and embodiments of the disclosure described herein include “consisting” and/or “consisting essentially of” aspects and embodiments.

[0080] As used herein and in the appended claims, the singular forms “a,” “or,” and “the” include plural referents unless the context clearly dictates otherwise. It is understood that aspects and variations of the disclosure described herein include “consisting” and/or “consisting essentially of” aspects and variations.

[0081] The term “optional” or “optionally” means that the subsequent described event, circumstance or substituent may or may not occur, and that the description includes instances where the event or circumstance occurs and instances where it does not.

[0082] The recitation of numerical ranges by endpoints includes all numbers and fractions subsumed within the respective ranges, as well as the recited endpoints.

[0083] The term “about” in relation to a reference numerical value and its grammatical equivalents as used herein can include the numerical value itself and a range of values plus or minus 10% from that numerical value. For example, the amount “about 10” includes 10 and any amounts from 9 to 11. For example, the term “about” in relation to a reference numerical value can also include a range of values plus or minus 10%, 9%, 8%, 7%, 6%, 5%, 4%, 3%, 2%, or 1% from that value. Reference to “about” a value or parameter herein includes (and describes) variations that are directed to that value or parameter per se. For example, description referring to “about X” includes description of “X”.

[0084] The term “exemplary” is used herein to mean serving as an example, instance, or illustration. Any aspect or design described herein as “exemplary” is not necessarily to be construed as preferred or advantageous over other aspects or designs. Rather, use of the word exemplary is intended to present concepts in a concrete fashion.

[0085] When a term refers to a protein, the term encompasses both the full-length of the protein as well as a functional fragment of the protein. The term “functional fragment” means that the sequence of the polypeptide may include less amino-acid than the original sequence but still enough amino-acids to confer the enzymatic activity of the original sequence of reference. It is well known in the art that a polypeptide can be modified by substitution, insertion, deletion and/or addition of one or more amino-acids while retaining its enzymatic activity. For example, substitutions of one amino-acid at a given position by chemically equivalent amino-acids that do not affect the functional properties of a protein are common.

### Activin II Receptors

[0086] In one aspect, the present disclosure provides an isolated protein comprising a mutant ActRIIA or ActRIIB polypeptide. The mutant activin type II B receptors (ActRIIB) refers to a mutant of the human activin receptors having accession number NP_001097.2 (SEQ ID NO: 45), and variants thereof. The mutant ActRIIA refers to a mutant of the human activin receptors having a sequence of SEQ ID NO: 47, and variants thereof.

[0087] In some embodiments, the isolated protein according to the present disclosure may comprise a mutant ActRIIB extracellular domain (ActRIIB-ECD), which is a mutant of the wild-type ActRIIB-ECD. The wild-type ActRIIB-ECD refers to the extracellular domain of ActRIIB, amino acids 1 to 134 (with signal sequence), or amino acids 19 through 134 of SEQ ID NO: 45 (without signal sequence) (referred to herein as SEQ ID NO: 46). The term wild-type ActRIIB-ECD may also refer to a functional, truncated form of the ActRIIB-ECD, for example the truncated sequence of SEQ ID NO: 1.

[0088] In some embodiments, the isolated protein according to the present disclosure may comprise a mutant of the wild-type soluble ActRIIB-ECD polypeptide. The wild type soluble ActRIIB-ECD polypeptide may be a truncated form of ActRIIB-ECD. In some examples, the wild type soluble ActRIIB-ECD has a sequence of SEQ ID NO: 1.

[0089] In some embodiments, the isolated protein according to the present disclosure may comprise a mutant of the wild-type soluble ActRIIA-ECD polypeptide. The wild type soluble ActRIIA-ECD polypeptide may be a truncated form of ActRIIA-ECD. In some examples, the wild type soluble ActRIIB-ECD has a sequence of SEQ ID NO: 1654.

Mutation(s) that Remove Glycosylation Site

[0090] The mutant soluble ActRII-ECD polypeptide may comprise one or more mutations that remove a glycosylation site in the wild type soluble ActRII-ECD. In some embodiments, the glycosylation site may be an N-linked glycosylation site. The N-linked glycosylation site may be a site corresponding to position N18 of SEQ ID NO: 1. Unless otherwise stated, references herein to an amino acid position of an ActRII-ECD polypeptide (e.g., position “N18” or “N41” of an ActRII-ECD polypeptide) refer to the corresponding positions as numbered in SEQ ID NO: 1. Without wishing to be bound by theory, removal of the N18 glycosylation site may reduce steric hindrance in the ligand binding site of the ActRII protein. For example, FIG. 1 shows a ActRIIB/GDF11/ALK5 complex modeled with biantennary glycan, which reveals a clash in binding two copies of ligand due to N18 glycans. Accordingly, the inventors envision that the removal of the N18 glycosylation site from various soluble ActRII-ECD polypeptides will result in similar improvements to ligand binding affinity.

[0091] In some embodiments, the mutant soluble ActRII-ECD may comprise a mutation at position corresponding to position N18 of SEQ ID NO: 1 (i.e., the asparagine at position N18 is substituted with another amino acid). For example, the mutant soluble ActRIIB-ECD may comprise a sequence of SEQ ID NO: 223. In another example, the mutant soluble ActRIIB-ECD may consist of a sequence of SEQ ID NO: 223. In some examples, the mutant soluble ActRIIB-ECD may comprise a N18Q mutation, i.e., in the mutant soluble ActRIIB-ECD, the asparagine at position N18 or a position corresponding to N18 is substituted with glutamine. For example, the mutant soluble ActRIIB-ECD may comprise a sequence of SEQ ID NO: 119. In another example, the mutant soluble ActRIIB-ECD may consist of a sequence of SEQ ID NO: 119. In one example, the mutant soluble ActRIIB-ECD may comprise a sequence of SEQ ID NO: 146. In another example, the mutant soluble ActRIIB-ECD may consist of a sequence of SEQ ID NO: 146. In another example, the mutant soluble ActRIIB-ECD may comprise a sequence of SEQ ID NO: 336. In another example, the mutant soluble ActRIIB-ECD may consist of a sequence of SEQ ID NO: 336. In another example, the mutant soluble ActRIIB-ECD may comprise a sequence of SEQ ID NO: 337. In another example, the mutant soluble ActRIIB-ECD may consist of a sequence of SEQ ID NO: 337. In another example, the mutant soluble ActRIIB-ECD may comprise a sequence of SEQ ID NO: 338. In another example, the mutant soluble ActRIIB-ECD may consist of a sequence of SEQ ID NO: 338. In another example, the mutant soluble ActRIIB-ECD may comprise a sequence of SEQ ID NO: 339. In another example, the mutant soluble ActRIIB-ECD may consist of a sequence of SEQ ID NO: 339. In another example, the mutant soluble ActRIIB-ECD may comprise a sequence of SEQ ID NO: 340. In another example, the mutant soluble ActRIIB-ECD may consist of a sequence of SEQ ID NO: 340. In another example, the mutant soluble ActRIIB-ECD may comprise a sequence of SEQ ID NO: 341. In another example, the mutant soluble ActRIIB-ECD may consist of a sequence of SEQ ID NO: 341. In another example, the mutant soluble ActRIIB-ECD may comprise a sequence of SEQ ID NO: 342. In another example, the mutant soluble ActRIIB-ECD may consist of a sequence of SEQ ID NO: 342. In another example, the mutant soluble ActRIIB-ECD may comprise a sequence of SEQ ID NO: 343. In another example, the mutant soluble ActRIIB-ECD may consist of a sequence of SEQ ID NO: 343. In another example, the mutant soluble ActRIIB-ECD may comprise a sequence of SEQ ID NO: 344. In another example, the mutant soluble ActRIIB-ECD may consist of a sequence of SEQ ID NO: 344. In another example, the mutant soluble ActRIIB-ECD may comprise a sequence of SEQ ID NO: 345. In another example, the mutant soluble ActRIIB-ECD may consist of a sequence of SEQ ID NO: 345. In another example, the mutant soluble ActRIIB-ECD may comprise a sequence of SEQ ID NO: 346. In another example, the mutant soluble ActRIIB-ECD may consist of a sequence of SEQ ID NO: 346. In another example, the mutant soluble ActRIIB-ECD may comprise a sequence of SEQ ID NO: 347. In another example, the mutant soluble ActRIIB-ECD may consist of a sequence of SEQ ID NO: 347. In another example, the mutant soluble ActRIIB-ECD may comprise a sequence of SEQ ID NO: 348. In another example, the mutant soluble ActRIIB-ECD may consist of a sequence of SEQ ID NO: 348. In another example, the mutant soluble ActRIIB-ECD may comprise a sequence of SEQ ID NO: 349. In another example, the mutant soluble ActRIIB-ECD may consist of a sequence of SEQ ID NO: 349. In another example, the mutant soluble ActRIIB-ECD may comprise a sequence of SEQ ID NO: 350. In another example, the mutant soluble ActRIIB-ECD may consist of a sequence of SEQ ID NO: 350. In another example, the mutant soluble ActRIIB-ECD may comprise a sequence of SEQ ID NO: 351. In another example, the mutant soluble ActRIIB-ECD may consist of a sequence of SEQ ID NO: 351. In another example, the mutant soluble ActRIIB-ECD may comprise a sequence of SEQ ID NO: 352. In another example, the mutant soluble ActRIIB-ECD may consist of a sequence of SEQ ID NO: 352. In another example, the mutant soluble ActRIIB-ECD may comprise a sequence of SEQ ID NO: 353. In another example, the mutant soluble ActRIIB-ECD may consist of a sequence of SEQ ID NO: 353. In another example, the mutant soluble ActRIIB-ECD may comprise a sequence of SEQ ID NO: 354. In another example, the mutant soluble ActRIIB-ECD may consist of a sequence of SEQ ID NO: 354.

[0092] In some embodiments, the isolated protein may comprise a mutant ActRIIB-ECD, which may comprise a sequence selected from the group consisting of SEQ ID NOs: 1, 119, 146, 223, or 336-354, and the mutant ActRIIB-ECD may further comprise from 1 to 6 additional amino acids on the N-terminus of the sequence corresponding to amino acids 1-6 of SEQ ID NO: 46. In some examples, the mutant ActRIIB-ECD may comprise a sequence of SEQ ID NO: 377, in which N19 is substituted with another amino acid. For example, the mutant ActRIIB-ECD may comprise a sequence of SEQ ID NO: 382. In some examples, the mutant ActRIIB-ECD may comprise a sequence of SEQ ID NO: 378, in which N20 is substituted with another amino acid. For example, the mutant ActRIIB-ECD may comprise a sequence of SEQ ID NO: 383. In some examples, the mutant ActRIIB-ECD may comprise a sequence of SEQ ID NO: 379, in which N21 is substituted with another amino acid. For example, the mutant ActRIIB-ECD may comprise a sequence of SEQ ID NO: 384. In some examples, the mutant ActRIIB-ECD may comprise a sequence of SEQ ID NO: 380, in which N22 is substituted with another amino acid. For example, the mutant ActRIIB-ECD may comprise a sequence of SEQ ID NO: 385. In some examples, the mutant ActRIIB-ECD may comprise a sequence of SEQ ID NO: 381, in which N23 is substituted with another amino acid. For example, the mutant ActRIIB-ECD may comprise a sequence of SEQ ID NO: 386. In some examples, the mutant ActRIIB-ECD may comprise a sequence of SEQ ID NO: 46, in which N24 is substituted with another amino acid. For example, the mutant ActRIIB-ECD may comprise a sequence of SEQ ID NO: 387.

[0093] In some examples, the mutant ActRIIB-ECD may comprise a sequence of SEQ ID NO: 377, in which S21 is substituted with another amino acid other than serine(S) or threonine (T). In some examples, the mutant ActRIIB-ECD may comprise a sequence of SEQ ID NO: 378, in which S22 is substituted with another amino acid other than serine(S) or threonine (T). In some examples, the mutant ActRIIB-ECD may comprise a sequence of SEQ ID NO: 379, in which S23 is substituted with another amino acid other than serine(S) or threonine (T). In some examples, the mutant ActRIIB-ECD may comprise a sequence of SEQ ID NO: 380, in which S24 is substituted with another amino acid other than serine(S) or threonine (T). In some examples, the mutant ActRIIB-ECD may comprise a sequence of SEQ ID NO: 381, in which S25 is substituted with another amino acid other than serine(S) or threonine (T). In some examples, the mutant ActRIIB-ECD may comprise a sequence of SEQ ID NO: 46, in which S26 is substituted with another amino acid other than serine(S) or threonine (T).

[0094] In some examples, the mutant soluble ActRIIB-ECD polypeptide may comprise a sequence at least 80% (e.g., at least 85%, 90%, 95%, 96%, 97%, or 98%) identical to SEQ ID NO: 1, in which the asparagine at position N18 is substituted with another amino acid. For example, the mutant soluble ActRIIB-ECD polypeptide may comprise a sequence at least 95% identical to SEQ ID NO: 1, in which the asparagine at position N18 is substituted with another amino acid.

[0095] In some examples, the mutant soluble ActRIIB-ECD polypeptide may comprise a sequence at least 80% (e.g., at least 85%, 90%, 95%, 96%, 97%, or 98%) identical to SEQ ID NO: 1, in which the asparagine at position N18 is substituted with glutamine. For example, the mutant soluble ActRIIB-ECD polypeptide may comprise a sequence at least 95% identical to SEQ ID NO: 1, in which the asparagine at position N18 is substituted with glutamine.

[0096] In some examples, the mutant soluble ActRIIB-ECD polypeptide may comprise a sequence at least 80% (e.g., at least 85%, 90%, 95%, 96%, 97%, or 98%) identical to SEQ ID NO: 1, in which the asparagine at position N18 is substituted with alanine. For example, the mutant soluble ActRIIB-ECD polypeptide may comprise a sequence at least 95% identical to SEQ ID NO: 1, in which the asparagine at position N18 is substituted with alanine.

[0097] In some examples, the mutant soluble ActRIIB-ECD polypeptide may comprise a sequence at least 80% (e.g., at least 85%, 90%, 95%, 96%, 97%, or 98%) identical to SEQ ID NO: 1, in which the asparagine at position N18 is substituted with arginine. For example, the mutant soluble ActRIIB-ECD polypeptide may comprise a sequence at least 95% identical to SEQ ID NO: 1, in which the asparagine at position N18 is substituted with arginine.

[0098] In some examples, the mutant soluble ActRIIB-ECD polypeptide may comprise a sequence at least 80% (e.g., at least 85%, 90%, 95%, 96%, 97%, or 98%) identical to SEQ ID NO: 1, in which the asparagine at position N18 is substituted with aspartate. For example, the mutant soluble ActRIIB-ECD polypeptide may comprise a sequence at least 95% identical to SEQ ID NO: 1, in which the asparagine at position N18 is substituted with aspartate.

[0099] In some examples, the mutant soluble ActRIIB-ECD polypeptide may comprise a sequence at least 80% (e.g., at least 85%, 90%, 95%, 96%, 97%, or 98%) identical to SEQ ID NO: 1, in which the asparagine at position N18 is substituted with cysteine. For example, the mutant soluble ActRIIB-ECD polypeptide may comprise a sequence at least 95% identical to SEQ ID NO: 1, in which the asparagine at position N18 is substituted with cysteine.

[0100] In some examples, the mutant soluble ActRIIB-ECD polypeptide may comprise a sequence at least 80% (e.g., at least 85%, 90%, 95%, 96%, 97%, or 98%) identical to SEQ ID NO: 1, in which the asparagine at position N18 is substituted with glutamate. For example, the mutant soluble ActRIIB-ECD polypeptide may comprise a sequence at least 95% identical to SEQ ID NO: 1, in which the asparagine at position N18 is substituted with glutamate.

[0101] In some examples, the mutant soluble ActRIIB-ECD polypeptide may comprise a sequence at least 80% (e.g., at least 85%, 90%, 95%, 96%, 97%, or 98%) identical to SEQ ID NO: 1, in which the asparagine at position N18 is substituted with glycine. For example, the mutant soluble ActRIIB-ECD polypeptide may comprise a sequence at least 95% identical to SEQ ID NO: 1, in which the asparagine at position N18 is substituted with glycine.

[0102] In some examples, the mutant soluble ActRIIB-ECD polypeptide may comprise a sequence at least 80% (e.g., at least 85%, 90%, 95%, 96%, 97%, or 98%) identical to SEQ ID NO: 1, in which the asparagine at position N18 is substituted with histidine. For example, the mutant soluble ActRIIB-ECD polypeptide may comprise a sequence at least 95% identical to SEQ ID NO: 1, in which the asparagine at position N18 is substituted with histidine.

[0103] In some examples, the mutant soluble ActRIIB-ECD polypeptide may comprise a sequence at least 80% (e.g., at least 85%, 90%, 95%, 96%, 97%, or 98%) identical to SEQ ID NO: 1, in which the asparagine at position N18 is substituted with isoleucine. For example, the mutant soluble ActRIIB-ECD polypeptide may comprise a sequence at least 95% identical to SEQ ID NO: 1, in which the asparagine at position N18 is substituted with isoleucine.

[0104] In some examples, the mutant soluble ActRIIB-ECD polypeptide may comprise a sequence at least 80% (e.g., at least 85%, 90%, 95%, 96%, 97%, or 98%) identical to SEQ ID NO: 1, in which the asparagine at position N18 is substituted with leucine. For example, the mutant soluble ActRIIB-ECD polypeptide may comprise a sequence at least 95% identical to SEQ ID NO: 1, in which the asparagine at position N18 is substituted with leucine.

[0105] In some examples, the mutant soluble ActRIIB-ECD polypeptide may comprise a sequence at least 80% (e.g., at least 85%, 90%, 95%, 96%, 97%, or 98%) identical to SEQ ID NO: 1, in which the asparagine at position N18 is substituted with lysine. For example, the mutant soluble ActRIIB-ECD polypeptide may comprise a sequence at least 95% identical to SEQ ID NO: 1, in which the asparagine at position N18 is substituted with lysine.

[0106] In some examples, the mutant soluble ActRIIB-ECD polypeptide may comprise a sequence at least 80% (e.g., at least 85%, 90%, 95%, 96%, 97%, or 98%) identical to SEQ ID NO: 1, in which the asparagine at position N18 is substituted with methionine. For example, the mutant soluble ActRIIB-ECD polypeptide may comprise a sequence at least 95% identical to SEQ ID NO: 1, in which the asparagine at position N18 is substituted with methionine.

[0107] In some examples, the mutant soluble ActRIIB-ECD polypeptide may comprise a sequence at least 80% (e.g., at least 85%, 90%, 95%, 96%, 97%, or 98%) identical to SEQ ID NO: 1, in which the asparagine at position N18 is substituted with phenylalanine. For example, the mutant soluble ActRIIB-ECD polypeptide may comprise a sequence at least 95% identical to SEQ ID NO: 1, in which the asparagine at position N18 is substituted with phenylalanine.

[0108] In some examples, the mutant soluble ActRIIB-ECD polypeptide may comprise a sequence at least 80% (e.g., at least 85%, 90%, 95%, 96%, 97%, or 98%) identical to SEQ ID NO: 1, in which the asparagine at position N18 is substituted with proline. For example, the mutant soluble ActRIIB-ECD polypeptide may comprise a sequence at least 95% identical to SEQ ID NO: 1, in which the asparagine at position N18 is substituted with proline.

[0109] In some examples, the mutant soluble ActRIIB-ECD polypeptide may comprise a sequence at least 80% (e.g., at least 85%, 90%, 95%, 96%, 97%, or 98%) identical to SEQ ID NO: 1, in which the asparagine at position N18 is substituted with serine. For example, the mutant soluble ActRIIB-ECD polypeptide may comprise a sequence at least 95% identical to SEQ ID NO: 1, in which the asparagine at position N18 is substituted with serine.

[0110] In some examples, the mutant soluble ActRIIB-ECD polypeptide may comprise a sequence at least 80% (e.g., at least 85%, 90%, 95%, 96%, 97%, or 98%) identical to SEQ ID NO: 1, in which the asparagine at position N18 is substituted with threonine. For example, the mutant soluble ActRIIB-ECD polypeptide may comprise a sequence at least 95% identical to SEQ ID NO: 1, in which the asparagine at position N18 is substituted with threonine.

[0111] In some examples, the mutant soluble ActRIIB-ECD polypeptide may comprise a sequence at least 80% (e.g., at least 85%, 90%, 95%, 96%, 97%, or 98%) identical to SEQ ID NO: 1, in which the asparagine at position N18 is substituted with tryptophan. For example, the mutant soluble ActRIIB-ECD polypeptide may comprise a sequence at least 95% identical to SEQ ID NO: 1, in which the asparagine at position N18 is substituted with tryptophan.

[0112] In some examples, the mutant soluble ActRIIB-ECD polypeptide may comprise a sequence at least 80% (e.g., at least 85%, 90%, 95%, 96%, 97%, or 98%) identical to SEQ ID NO: 1, in which the asparagine at position N18 is substituted with tyrosine. For example, the mutant soluble ActRIIB-ECD polypeptide may comprise a sequence at least 95% identical to SEQ ID NO: 1, in which the asparagine at position N18 is substituted with tyrosine.

[0113] In some examples, the mutant soluble ActRIIB-ECD polypeptide may comprise a sequence at least 80% (e.g., at least 85%, 90%, 95%, 96%, 97%, or 98%) identical to SEQ ID NO: 1, in which the asparagine at position N18 is substituted with valine. For example, the mutant soluble ActRIIB-ECD polypeptide may comprise a sequence at least 95% identical to SEQ ID NO: 1, in which the asparagine at position N18 is substituted with valine.

[0114] In some embodiments, the mutation on the N-linked glycosylation site may be on an amino acid residue corresponding to position S20 of SEQ ID NO: 1. In some examples, in the mutant soluble ActRIIB-ECD, the serine at position corresponding to S20 of SEQ ID NO: 1 may be substituted with an amino acid residue that is not serine or threonine. For example, the mutant soluble ActRIIB-ECD may comprise a sequence of SEQ ID NO: 326. For example, the mutant soluble ActRIIB-ECD may comprise a sequence of SEQ ID NO: 355. In another example, the mutant soluble ActRIIB-ECD may consist of a sequence of SEQ ID NO: 355. In another example, the mutant soluble ActRIIB-ECD may comprise a sequence of SEQ ID NO: 356. In another example, the mutant soluble ActRIIB-ECD may consist of a sequence of SEQ ID NO: 356. In another example, the mutant soluble ActRIIB-ECD may comprise a sequence of SEQ ID NO: 357. In another example, the mutant soluble ActRIIB-ECD may consist of a sequence of SEQ ID NO: 357. In another example, the mutant soluble ActRIIB-ECD may comprise a sequence of SEQ ID NO: 358. In another example, the mutant soluble ActRIIB-ECD may consist of a sequence of SEQ ID NO: 358. In another example, the mutant soluble ActRIIB-ECD may comprise a sequence of SEQ ID NO: 359. In another example, the mutant soluble ActRIIB-ECD may consist of a sequence of SEQ ID NO: 359. In another example, the mutant soluble ActRIIB-ECD may comprise a sequence of SEQ ID NO: 360. In another example, the mutant soluble ActRIIB-ECD may consist of a sequence of SEQ ID NO: 360. In another example, the mutant soluble ActRIIB-ECD may comprise a sequence of SEQ ID NO: 361. In another example, the mutant soluble ActRIIB-ECD may consist of a sequence of SEQ ID NO: 361. In another example, the mutant soluble ActRIIB-ECD may comprise a sequence of SEQ ID NO: 362. In another example, the mutant soluble ActRIIB-ECD may consist of a sequence of SEQ ID NO: 362. In another example, the mutant soluble ActRIIB-ECD may comprise a sequence of SEQ ID NO: 363. In another example, the mutant soluble ActRIIB-ECD may consist of a sequence of SEQ ID NO: 363. In another example, the mutant soluble ActRIIB-ECD may comprise a sequence of SEQ ID NO: 364. In another example, the mutant soluble ActRIIB-ECD may consist of a sequence of SEQ ID NO: 364. In another example, the mutant soluble ActRIIB-ECD may comprise a sequence of SEQ ID NO: 365. In another example, the mutant soluble ActRIIB-ECD may consist of a sequence of SEQ ID NO: 365. In another example, the mutant soluble ActRIIB-ECD may comprise a sequence of SEQ ID NO: 366. In another example, the mutant soluble ActRIIB-ECD may consist of a sequence of SEQ ID NO: 366. In another example, the mutant soluble ActRIIB-ECD may comprise a sequence of SEQ ID NO: 367. In another example, the mutant soluble ActRIIB-ECD may consist of a sequence of SEQ ID NO: 367. In another example, the mutant soluble ActRIIB-ECD may comprise a sequence of SEQ ID NO: 368. In another example, the mutant soluble ActRIIB-ECD may consist of a sequence of SEQ ID NO: 368. In another example, the mutant soluble ActRIIB-ECD may comprise a sequence of SEQ ID NO: 369. In another example, the mutant soluble ActRIIB-ECD may consist of a sequence of SEQ ID NO: 369. In another example, the mutant soluble ActRIIB-ECD may comprise a sequence of SEQ ID NO: 370. In another example, the mutant soluble ActRIIB-ECD may consist of a sequence of SEQ ID NO: 370. In another example, the mutant soluble ActRIIB-ECD may comprise a sequence of SEQ ID NO: 371. In another example, the mutant soluble ActRIIB-ECD may consist of a sequence of SEQ ID NO: 371. In another example, the mutant soluble ActRIIB-ECD may comprise a sequence of SEQ ID NO: 372. In another example, the mutant soluble ActRIIB-ECD may consist of a sequence of SEQ ID NO: 372. In some embodiments, the isolated protein may comprise a mutant ActRIIB-ECD, which may comprise a sequence selected from the group consisting of SEQ ID NOs: 355-372, wherein the mutant ActRIIB-ECD may further comprise from 1 to 6 additional amino acids on the N-terminus of the sequence corresponding to amino acids 1-6 of SEQ ID NO: 46.

[0115] In some example, the mutant soluble ActRIIB-ECD polypeptide may comprise a sequence at least 80% (e.g., at least 85%, 90%, 95%, 96%, 97%, or 98%) identical to SEQ ID NO: 1, in which the serine at position S20 is be substituted with an amino acid residue that is not serine or threonine. For example, the mutant soluble ActRIIB-ECD polypeptide may comprise a sequence at least 95% identical to SEQ ID NO: 1, in which the serine at position S20 is substituted with an amino acid residue that is not serine(S) or threonine (T).

[0116] In some examples, the mutant soluble ActRIIB-ECD polypeptide may comprise a sequence at least 80% (e.g., at least 85%, 90%, 95%, 96%, 97%, or 98%) identical to SEQ ID NO: 1, in which the serine at position S20 is substituted with alanine. For example, the mutant soluble ActRIIB-ECD polypeptide may comprise a sequence at least 95% identical to SEQ ID NO: 1, in which the serine at position S20 is substituted with alanine.

[0117] In some examples, the mutant soluble ActRIIB-ECD polypeptide may comprise a sequence at least 80% (e.g., at least 85%, 90%, 95%, 96%, 97%, or 98%) identical to SEQ ID NO: 1, in which the serine at position S20 is substituted with arginine. For example, the mutant soluble ActRIIB-ECD polypeptide may comprise a sequence at least 95% identical to SEQ ID NO: 1, in which the serine at position S20 is substituted with arginine.

[0118] In some examples, the mutant soluble ActRIIB-ECD polypeptide may comprise a sequence at least 80% (e.g., at least 85%, 90%, 95%, 96%, 97%, or 98%) identical to SEQ ID NO: 1, in which the serine at position S20 is substituted with asparagine. For example, the mutant soluble ActRIIB-ECD polypeptide may comprise a sequence at least 95% identical to SEQ ID NO: 1, in which the serine at position S20 is substituted with asparagine.

[0119] In some examples, the mutant soluble ActRIIB-ECD polypeptide may comprise a sequence at least 80% (e.g., at least 85%, 90%, 95%, 96%, 97%, or 98%) identical to SEQ ID NO: 1, in which the serine at position S20 is substituted with aspartate. For example, the mutant soluble ActRIIB-ECD polypeptide may comprise a sequence at least 95% identical to SEQ ID NO: 1, in which the serine at position S20 is substituted with aspartate.

[0120] In some examples, the mutant soluble ActRIIB-ECD polypeptide may comprise a sequence at least 80% (e.g., at least 85%, 90%, 95%, 96%, 97%, or 98%) identical to SEQ ID NO: 1, in which the serine at position S20 is substituted with cysteine. For example, the mutant soluble ActRIIB-ECD polypeptide may comprise a sequence at least 95% identical to SEQ ID NO: 1, in which the serine at position S20 is substituted with cysteine.

[0121] In some examples, the mutant soluble ActRIIB-ECD polypeptide may comprise a sequence at least 80% (e.g., at least 85%, 90%, 95%, 96%, 97%, or 98%) identical to SEQ ID NO: 1, in which the serine at position S20 is substituted with glutamate. For example, the mutant soluble ActRIIB-ECD polypeptide may comprise a sequence at least 95% identical to SEQ ID NO: 1, in which the serine at position S20 is substituted with glutamate.

[0122] In some examples, the mutant soluble ActRIIB-ECD polypeptide may comprise a sequence at least 80% (e.g., at least 85%, 90%, 95%, 96%, 97%, or 98%) identical to SEQ ID NO: 1, in which the serine at position S20 is substituted with glutamine. For example, the mutant soluble ActRIIB-ECD polypeptide may comprise a sequence at least 95% identical to SEQ ID NO: 1, in which the serine at position S20 is substituted with glutamine.

[0123] In some examples, the mutant soluble ActRIIB-ECD polypeptide may comprise a sequence at least 80% (e.g., at least 85%, 90%, 95%, 96%, 97%, or 98%) identical to SEQ ID NO: 1, in which the serine at position S20 is substituted with glycine. For example, the mutant soluble ActRIIB-ECD polypeptide may comprise a sequence at least 95% identical to SEQ ID NO: 1, in which the serine at position S20 is substituted with glycine.

[0124] In some examples, the mutant soluble ActRIIB-ECD polypeptide may comprise a sequence at least 80% (e.g., at least 85%, 90%, 95%, 96%, 97%, or 98%) identical to SEQ ID NO: 1, in which the serine at position S20 is substituted with histidine. For example, the mutant soluble ActRIIB-ECD polypeptide may comprise a sequence at least 95% identical to SEQ ID NO: 1, in which the serine at position S20 is substituted with histidine.

[0125] In some examples, the mutant soluble ActRIIB-ECD polypeptide may comprise a sequence at least 80% (e.g., at least 85%, 90%, 95%, 96%, 97%, or 98%) identical to SEQ ID NO: 1, in which the serine at position S20 is substituted with isoleucine. For example, the mutant soluble ActRIIB-ECD polypeptide may comprise a sequence at least 95% identical to SEQ ID NO: 1, in which the serine at position S20 is substituted with isoleucine.

[0126] In some examples, the mutant soluble ActRIIB-ECD polypeptide may comprise a sequence at least 80% (e.g., at least 85%, 90%, 95%, 96%, 97%, or 98%) identical to SEQ ID NO: 1, in which the serine at position S20 is substituted with leucine. For example, the mutant soluble ActRIIB-ECD polypeptide may comprise a sequence at least 95% identical to SEQ ID NO: 1, in which the serine at position S20 is substituted with leucine.

[0127] In some examples, the mutant soluble ActRIIB-ECD polypeptide may comprise a sequence at least 80% (e.g., at least 85%, 90%, 95%, 96%, 97%, or 98%) identical to SEQ ID NO: 1, in which the serine at position S20 is substituted with lysine. For example, the mutant soluble ActRIIB-ECD polypeptide may comprise a sequence at least 95% identical to SEQ ID NO: 1, in which the serine at position S20 is substituted with lysine.

[0128] In some examples, the mutant soluble ActRIIB-ECD polypeptide may comprise a sequence at least 80% (e.g., at least 85%, 90%, 95%, 96%, 97%, or 98%) identical to SEQ ID NO: 1, in which the serine at position S20 is substituted with methionine. For example, the mutant soluble ActRIIB-ECD polypeptide may comprise a sequence at least 95% identical to SEQ ID NO: 1, in which the serine at position S20 is substituted with methionine.

[0129] In some examples, the mutant soluble ActRIIB-ECD polypeptide may comprise a sequence at least 80% (e.g., at least 85%, 90%, 95%, 96%, 97%, or 98%) identical to SEQ ID NO: 1, in which the serine at position S20 is substituted with phenylalanine. For example, the mutant soluble ActRIIB-ECD polypeptide may comprise a sequence at least 95% identical to SEQ ID NO: 1, in which the serine at position S20 is substituted with phenylalanine.

[0130] In some examples, the mutant soluble ActRIIB-ECD polypeptide may comprise a sequence at least 80% (e.g., at least 85%, 90%, 95%, 96%, 97%, or 98%) identical to SEQ ID NO: 1, in which the serine at position S20 is substituted with proline. For example, the mutant soluble ActRIIB-ECD polypeptide may comprise a sequence at least 95% identical to SEQ ID NO: 1, in which the serine at position S20 is substituted with proline.

[0131] In some examples, the mutant soluble ActRIIB-ECD polypeptide may comprise a sequence at least 80% (e.g., at least 85%, 90%, 95%, 96%, 97%, or 98%) identical to SEQ ID NO: 1, in which the serine at position S20 is substituted with tryptophan. For example, the mutant soluble ActRIIB-ECD polypeptide may comprise a sequence at least 95% identical to SEQ ID NO: 1, in which the serine at position S20 is substituted with tryptophan.

[0132] In some examples, the mutant soluble ActRIIB-ECD polypeptide may comprise a sequence at least 80% (e.g., at least 85%, 90%, 95%, 96%, 97%, or 98%) identical to SEQ ID NO: 1, in which the serine at position S20 is substituted with tyrosine. For example, the mutant soluble ActRIIB-ECD polypeptide may comprise a sequence at least 95% identical to SEQ ID NO: 1, in which the serine at position S20 is substituted with tyrosine.

[0133] In some examples, the mutant soluble ActRIIB-ECD polypeptide may comprise a sequence at least 80% (e.g., at least 85%, 90%, 95%, 96%, 97%, or 98%) identical to SEQ ID NO: 1, in which the serine at position S20 is substituted with valine. For example, the mutant soluble ActRIIB-ECD polypeptide may comprise a sequence at least 95% identical to SEQ ID NO: 1, in which the serine at position S20 is substituted with valine.

[0134] In some aspects, the isolated protein may comprise a mutant soluble ActRIIA-ECD. The mutant soluble ActRIIA-ECD may comprise any mutations corresponding to any of the mutations in the mutant soluble ActRIIB-ECD described herein, or other mutations to ActRIIA-ECD known in the art. The N18 and N41 glycosylation sites are conserved between ActRIIA-ECD and ActRIIB-ECD (see FIGS. 5A and 5B). Thus, N18 of soluble ActRIIA-ECD corresponds to N18 of soluble ActRIIB-ECD. T20 of soluble ActRIIA-ECD corresponds to S20 of soluble ActRIIB-ECD. N41 of soluble ActRIIA-ECD corresponds to N41 of soluble ActRIIB-ECD. In some embodiments, the isolated protein may comprise a mutant soluble ActRIIA-ECD comprising a mutation that removes the glycosylation site at N18 of SEQ ID NO: 1654. SEQ ID NO: 1654 is a truncated form of wild-type human ActRIIA-ECD (SEQ ID NO: 48), in which the first six amino acids at the N-terminus of SEQ ID NO: 48 are truncated.

[0135] In some embodiments, the mutant soluble ActRIIA-ECD may comprise a mutation at position corresponding to position N18 of SEQ ID NO: 1654 (i.e., the asparagine at position N18 is substituted with another amino acid). For example, the mutant soluble ActRIIA-ECD may comprise a sequence of SEQ ID NO: 1655.

[0136] In some examples, the mutant soluble ActRIIA-ECD may comprise a N18Q mutation, i.e., in the mutant soluble ActRIIA-ECD, the asparagine at position N18 or a position corresponding to N18 is substituted with glutamine. For example, the mutant soluble ActRIIA-ECD may comprise a sequence of SEQ ID NO: 1656. In another example, the mutant soluble ActRIIA-ECD may consist of a sequence of SEQ ID NO: 1656.

[0137] In some examples, the mutant soluble ActRIIA-ECD polypeptide may comprise a sequence at least 80% (e.g., at least 85%, 90%, 95%, 96%, 97%, or 98%) identical to SEQ ID NO: 1655, in which the asparagine at position N18 is substituted with another amino acid. For example, the mutant soluble ActRIIA-ECD polypeptide may comprise a sequence at least 95% identical to SEQ ID NO: 1655, in which the asparagine at position N18 is substituted with another amino acid.

[0138] In some examples, the mutant soluble ActRIIA-ECD polypeptide may comprise a sequence at least 80% (e.g., at least 85%, 90%, 95%, 96%, 97%, or 98%) identical to SEQ ID NO: 1656, in which the asparagine at position N18 is substituted with glutamine. For example, the mutant soluble ActRIIA-ECD polypeptide may comprise a sequence at least 95% identical to SEQ ID NO: 1656, in which the asparagine at position N18 is substituted with glutamine.

[0139] In some embodiments, the mutant soluble ActRIIA-ECD may comprise a mutation at position corresponding to position T20 of SEQ ID NO: 1654 (i.e., the asparagine at position T20 is substituted with another amino acid other than serine(S) or threonine (T)). For example, the mutant soluble ActRIIA-ECD may comprise a sequence of SEQ ID NO: 1657.

[0140] In some examples, the mutant soluble ActRIIA-ECD polypeptide may comprise a sequence at least 80% (e.g., at least 85%, 90%, 95%, 96%, 97%, or 98%) identical to SEQ ID NO: 1657, in which the asparagine at position T20 is substituted with another amino acid than serine(S) or threonine (T). For example, the mutant soluble ActRIIA-ECD polypeptide may comprise a sequence at least 95% identical to SEQ ID NO: 1655, in which the asparagine at position T20 is substituted with another amino acid than serine(S) or threonine (T).

[0141] In some embodiments, the isolated protein may comprise a mutant soluble ActRIIA-ECD, which may comprise a sequence selected from the group consisting of SEQ ID NOs: 1655, 1656, and 1657, and the mutant soluble ActRIIA-ECD may further comprise from 1 to 6 additional amino acids on the N-terminus of the sequence corresponding to amino acids 1-6 of SEQ ID NO: 48. In one example, the mutant soluble ActRIIA-ECD may have comprise S on the N-terminus. In one example, the mutant soluble ActRIIA-ECD may have comprise RS on the N-terminus. In one example, the mutant soluble ActRIIA-ECD may have comprise GRS on the N-terminus. In one example, the mutant soluble ActRIIA-ECD may have comprise LGRS on the N-terminus. In one example, the mutant soluble ActRIIA-ECD may have comprise ILGRS on the N-terminus. In one example, the mutant soluble ActRIIA-ECD may have comprise AILGRS on the N-terminus.

### Additional Mutation(s)

[0142] Besides the one or more mutations that remove a glycosylation site (e.g., the N-linked glycosylation site), the mutant soluble ActRIIB-ECD polypeptide may further comprise one or more additional mutations.

[0143] In some embodiments, the one or more additional mutations may be introduced so that the mutant soluble ActRIIB-ECD demonstrates a marked reduction of BMP9-neutralization as compared to a wild-type soluble ActRIIB-ECD or mutant soluble ActRIIB-ECD without the additional mutations, while retaining (e.g., fully retaining) myostatin- and activin A-neutralization. In some embodiments, the additional mutations may be introduced by replacing one or more amino acids of a wild-type soluble ActRIIB-ECD (SEQ ID NO: 1) with the amino acids from a wild-type soluble ActRIIA-ECD (SEQ ID NO: 2) at corresponding position(s) based on sequence alignment between the two soluble ActRII ECD domains at the amino acid level. The term “wild-type ActRIIA-ECD” refers to the extracellular domain of ActRIIA, amino acids 1 to 135 (with signal sequence), or amino acids 20 through 135 of SEQ ID NO: 47 (without signal sequence) (referred to herein as SEQ ID NO: 48).

[0144] In some embodiments, the one or more additional mutations may be introduced so that at least one of amino acid residues corresponding to R3, I6, Y7, Y8, L14, E15, S20, L22, R24, E26, E28, Q29, L33, L48, Y36, S38, R40, S42, T45, K51, F58, Q64, E65, A68, T69, E70, E71, N72, Q74, F84, R88, T90, H91, L92, E94, A95, G96, G97, P98, E99, V100, Y102, E103, P105, P106, T107, A108, or T110 of SEQ ID NO: 1 is substituted with another amino acid residue (e.g., amino acid residue in the corresponding position of SEQ ID NO: 2). In some embodiments, the one or more additional mutations may be introduced so that at least two of amino acid residues corresponding to R3, I6, Y7, Y8, L14, E15, S20, L22, R24, E26, E28, Q29, L33, L48, Y36, S38, R40, S42, T45, K51, F58, Q64, E65, A68, T69, E70, E71, N72, Q74, F84, R88, T90, H91, L92, E94, A95, G96, G97, P98, E99, V100, Y102, E103, P105, P106, T107, A108, or T110 of SEQ ID NO: 1 is substituted with another amino acid residue (e.g., amino acid residue in the corresponding position of SEQ ID NO: 2). In some embodiments, the one or more additional mutations may be introduced so that at least three of amino acid residues corresponding to R3, I6, Y7, Y8, L14, E15, S20, L22, R24, E26, E28, Q29, L33, L48, Y36, S38, R40, S42, T45, K51, F58, Q64, E65, A68, T69, E70, E71, N72, Q74, F84, R88, T90, H91, L92, E94, A95, G96, G97, P98, E99, V100, Y102, E103, P105, P106, T107, A108, or T110 of SEQ ID NO: 1 is substituted with another amino acid residue (e.g., amino acid residue in the corresponding position of SEQ ID NO: 2). In some embodiments, the one or more additional mutations may be introduced so that at least four of amino acid residues corresponding to R3, I6, Y7, Y8, L14, E15, S20, L22, R24, E26, E28, Q29, L33, L48, Y36, S38, R40, S42, T45, K51, F58, Q64, E65, A68, T69, E70, E71, N72, Q74, F84, R88, T90, H91, L92, E94, A95, G96, G97, P98, E99, V100, Y102, E103, P105, P106, T107, A108, or T110 of SEQ ID NO: 1 is substituted with another amino acid residue (e.g., amino acid residue in the corresponding position of SEQ ID NO: 2). In some embodiments, the one or more additional mutations may be introduced so that at least five of amino acid residues corresponding to R3, I6, Y7, Y8, L14, E15, S20, L22, R24, E26, E28, Q29, L33, L48, Y36, S38, R40, S42, T45, K51, F58, Q64, E65, A68, T69, E70, E71, N72, Q74, F84, R88, T90, H91, L92, E94, A95, G96, G97, P98, E99, V100, Y102, E103, P105, P106, T107, A108, or T110 of SEQ ID NO: 1 is substituted with another amino acid residue (e.g., amino acid residue in the corresponding position of SEQ ID NO: 2). In some embodiments, the one or more additional mutations may be introduced so that at least six of amino acid residues corresponding to R3, I6, Y7, Y8, L14, E15, S20, L22, R24, E26, E28, Q29, L33, L48, Y36, S38, R40, S42, T45, K51, F58, Q64, E65, A68, T69, E70, E71, N72, Q74, F84, R88, T90, H91, L92, E94, A95, G96, G97, P98, E99, V100, Y102, E103, P105, P106, T107, A108, or T110 of SEQ ID NO: 1 is substituted with another amino acid residue (e.g., amino acid residue in the corresponding position of SEQ ID NO: 2). In some embodiments, the one or more additional mutations may be introduced so that at least seven of amino acid residues corresponding to R3, I6, Y7, Y8, L14, E15, S20, L22, R24, E26, E28, Q29, L33, L48, Y36, S38, R40, S42, T45, K51, F58, Q64, E65, A68, T69, E70, E71, N72, Q74, F84, R88, T90, H91, L92, E94, A95, G96, G97, P98, E99, V100, Y102, E103, P105, P106, T107, A108, or T110 of SEQ ID NO: 1 is substituted with another amino acid residue (e.g., amino acid residue in the corresponding position of SEQ ID NO: 2). In some embodiments, the one or more additional mutations may be introduced so that at least eight of amino acid residues corresponding to R3, I6, Y7, Y8, L14, E15, S20, L22, R24, E26, E28, Q29, L33, L48, Y36, S38, R40, S42, T45, K51, F58, Q64, E65, A68, T69, E70, E71, N72, Q74, F84, R88, T90, H91, L92, E94, A95, G96, G97, P98, E99, V100, Y102, E103, P105, P106, T107, A108, or T110 of SEQ ID NO: 1 is substituted with another amino acid residue (e.g., amino acid residue in the corresponding position of SEQ ID NO: 2). In some embodiments, the one or more additional mutations may be introduced so that at least nine of amino acid residues corresponding to R3, I6, Y7, Y8, L14, E15, S20, L22, R24, E26, E28, Q29, L33, L48, Y36, S38, R40, S42, T45, K51, F58, Q64, E65, A68, T69, E70, E71, N72, Q74, F84, R88, T90, H91, L92, E94, A95, G96, G97, P98, E99, V100, Y102, E103, P105, P106, T107, A108, or T110 of SEQ ID NO: 1 is substituted with another amino acid residue (e.g., amino acid residue in the corresponding position of SEQ ID NO: 2). In some embodiments, the one or more additional mutations may be introduced so that at least ten of amino acid residues corresponding to R3, I6, Y7, Y8, L14, E15, S20, L22, R24, E26, E28, Q29, L33, L48, Y36, S38, R40, S42, T45, K51, F58, Q64, E65, A68, T69, E70, E71, N72, Q74, F84, R88, T90, H91, L92, E94, A95, G96, G97, P98, E99, V100, Y102, E103, P105, P106, T107, A108, or T110 of SEQ ID NO: 1 is substituted with another amino acid residue (e.g., amino acid residue in the corresponding position of SEQ ID NO: 2). In some embodiments, the one or more additional mutations may be introduced so that at least fifteen of amino acid residues corresponding to R3, I6, Y7, Y8, L14, E15, S20, L22, R24, E26, E28, Q29, L33, L48, Y36, S38, R40, S42, T45, K51, F58, Q64, E65, A68, T69, E70, E71, N72, Q74, F84, R88, T90, H91, L92, E94, A95, G96, G97, P98, E99, V100, Y102, E103, P105, P106, T107, A108, or T110 of SEQ ID NO: 1 is substituted with another amino acid residue (e.g., amino acid residue in the corresponding position of SEQ ID NO: 2). In some embodiments, the one or more additional mutations may be introduced so that at least twenty of amino acid residues corresponding to R3, 16, Y7, Y8, L14, E15, S20, L22, R24, E26, E28, Q29, L33, L48, Y36, S38, R40, S42, T45, K51, F58, Q64, E65, A68, T69, E70, E71, N72, Q74, F84, R88, T90, H91, L92, E94, A95, G96, G97, P98, E99, V100, Y102, E103, P105, P106, T107, A108, or T110 of SEQ ID NO: 1 is substituted with another amino acid residue (e.g., amino acid residue in the corresponding position of SEQ ID NO: 2). In some embodiments, the one or more additional mutations may be introduced so that at least twenty-five of amino acid residues corresponding to R3, I6, Y7, Y8, L14, E15, S20, L22, R24, E26, E28, Q29, L33, L48, Y36, S38, R40, S42, T45, K51, F58, Q64, E65, A68, T69, E70, E71, N72, Q74, F84, R88, T90, H91, L92, E94, A95, G96, G97, P98, E99, V100, Y102, E103, P105, P106, T107, A108, or T110 of SEQ ID NO: 1 is substituted with another amino acid residue (e.g., amino acid residue in the corresponding position of SEQ ID NO: 2). In some embodiments, the one or more additional mutations may be introduced so that at least thirty of amino acid residues corresponding to R3, I6, Y7, Y8, L14, E15, S20, L22, R24, E26, E28, Q29, L33, L48, Y36, S38, R40, S42, T45, K51, F58, Q64, E65, A68, T69, E70, E71, N72, Q74, F84, R88, T90, H91, L92, E94, A95, G96, G97, P98, E99, V100, Y102, E103, P105, P106, T107, A108, or T110 of SEQ ID NO: 1 is substituted with another amino acid residue (e.g., amino acid residue in the corresponding position of SEQ ID NO: 2).

[0145] In some embodiments, the mutant soluble ActRIIB-ECD may comprise a sequence of any one of SEQ ID NOs: 3-37 and 51-117, in which the asparagine at position N18 is substituted with another amino acid. In some examples, the mutant soluble ActRIIB-ECD may comprise a sequence of SEQ ID NO: 224. In some examples, the mutant soluble ActRIIB-ECD may comprise a sequence of SEQ ID NO: 225. In some examples, the mutant soluble ActRIIB-ECD may comprise a sequence of SEQ ID NO: 226. In some examples, the mutant soluble ActRIIB-ECD may comprise a sequence of SEQ ID NO: 227. In some examples, the mutant soluble ActRIIB-ECD may comprise a sequence of SEQ ID NO: 228. In some examples, the mutant soluble ActRIIB-ECD may comprise a sequence of SEQ ID NO: 229. In some examples, the mutant soluble ActRIIB-ECD may comprise a sequence of SEQ ID NO: 230. In some examples, the mutant soluble ActRIIB-ECD may comprise a sequence of SEQ ID NO: 231. In some examples, the mutant soluble ActRIIB-ECD may comprise a sequence of SEQ ID NO: 232. In some examples, the mutant soluble ActRIIB-ECD may comprise a sequence of SEQ ID NO: 233. In some examples, the mutant soluble ActRIIB-ECD may comprise a sequence of SEQ ID NO: 234. In some examples, the mutant soluble ActRIIB-ECD may comprise a sequence of SEQ ID NO: 235. In some examples, the mutant soluble ActRIIB-ECD may comprise a sequence of SEQ ID NO: 236. In some examples, the mutant soluble ActRIIB-ECD may comprise a sequence of SEQ ID NO: 237. In some examples, the mutant soluble ActRIIB-ECD may comprise a sequence of SEQ ID NO: 238. In some examples, the mutant soluble ActRIIB-ECD may comprise a sequence of SEQ ID NO: 239. In some examples, the mutant soluble ActRIIB-ECD may comprise a sequence of SEQ ID NO: 240. In some examples, the mutant soluble ActRIIB-ECD may comprise a sequence of SEQ ID NO: 241. In some examples, the mutant soluble ActRIIB-ECD may comprise a sequence of SEQ ID NO: 242. In some examples, the mutant soluble ActRIIB-ECD may comprise a sequence of SEQ ID NO: 243. In some examples, the mutant soluble ActRIIB-ECD may comprise a sequence of SEQ ID NO: 244. In some examples, the mutant soluble ActRIIB-ECD may comprise a sequence of SEQ ID NO: 245. In some examples, the mutant soluble ActRIIB-ECD may comprise a sequence of SEQ ID NO: 246. In some examples, the mutant soluble ActRIIB-ECD may comprise a sequence of SEQ ID NO: 247. In some examples, the mutant soluble ActRIIB-ECD may comprise a sequence of SEQ ID NO: 248. In some examples, the mutant soluble ActRIIB-ECD may comprise a sequence of SEQ ID NO: 249. In some examples, the mutant soluble ActRIIB-ECD may comprise a sequence of SEQ ID NO: 250. In some examples, the mutant soluble ActRIIB-ECD may comprise a sequence of SEQ ID NO: 251. In some examples, the mutant soluble ActRIIB-ECD may comprise a sequence of SEQ ID NO: 252. In some examples, the mutant soluble ActRIIB-ECD may comprise a sequence of SEQ ID NO: 253. In some examples, the mutant soluble ActRIIB-ECD may comprise a sequence of SEQ ID NO: 254. In some examples, the mutant soluble ActRIIB-ECD may comprise a sequence of SEQ ID NO: 255. In some examples, the mutant soluble ActRIIB-ECD may comprise a sequence of SEQ ID NO: 256. In some examples, the mutant soluble ActRIIB-ECD may comprise a sequence of SEQ ID NO: 257. In some examples, the mutant soluble ActRIIB-ECD may comprise a sequence of SEQ ID NO: 258. In some examples, the mutant soluble ActRIIB-ECD may comprise a sequence of SEQ ID NO: 259. In some examples, the mutant soluble ActRIIB-ECD may comprise a sequence of SEQ ID NO: 260. In some examples, the mutant soluble ActRIIB-ECD may comprise a sequence of SEQ ID NO: 261. In some examples, the mutant soluble ActRIIB-ECD may comprise a sequence of SEQ ID NO: 262. In some examples, the mutant soluble ActRIIB-ECD may comprise a sequence of SEQ ID NO: 263. In some examples, the mutant soluble ActRIIB-ECD may comprise a sequence of SEQ ID NO: 264. In some examples, the mutant soluble ActRIIB-ECD may comprise a sequence of SEQ ID NO: 265. In some examples, the mutant soluble ActRIIB-ECD may comprise a sequence of SEQ ID NO: 266. In some examples, the mutant soluble ActRIIB-ECD may comprise a sequence of SEQ ID NO: 267. In some examples, the mutant soluble ActRIIB-ECD may comprise a sequence of SEQ ID NO: 268. In some examples, the mutant soluble ActRIIB-ECD may comprise a sequence of SEQ ID NO: 269. In some examples, the mutant soluble ActRIIB-ECD may comprise a sequence of SEQ ID NO: 270. In some examples, the mutant soluble ActRIIB-ECD may comprise a sequence of SEQ ID NO: 271. In some examples, the mutant soluble ActRIIB-ECD may comprise a sequence of SEQ ID NO: 272. In some examples, the mutant soluble ActRIIB-ECD may comprise a sequence of SEQ ID NO: 273. In some examples, the mutant soluble ActRIIB-ECD may comprise a sequence of SEQ ID NO: 274. In some examples, the mutant soluble ActRIIB-ECD may comprise a sequence of SEQ ID NO: 275. In some examples, the mutant soluble ActRIIB-ECD may comprise a sequence of SEQ ID NO: 276. In some examples, the mutant soluble ActRIIB-ECD may comprise a sequence of SEQ ID NO: 277. In some examples, the mutant soluble ActRIIB-ECD may comprise a sequence of SEQ ID NO: 278. In some examples, the mutant soluble ActRIIB-ECD may comprise a sequence of SEQ ID NO: 279. In some examples, the mutant soluble ActRIIB-ECD may comprise a sequence of SEQ ID NO: 280. In some examples, the mutant soluble ActRIIB-ECD may comprise a sequence of SEQ ID NO: 281. In some examples, the mutant soluble ActRIIB-ECD may comprise a sequence of SEQ ID NO: 282. In some examples, the mutant soluble ActRIIB-ECD may comprise a sequence of SEQ ID NO: 283. In some examples, the mutant soluble ActRIIB-ECD may comprise a sequence of SEQ ID NO: 284. In some examples, the mutant soluble ActRIIB-ECD may comprise a sequence of SEQ ID NO: 285. In some examples, the mutant soluble ActRIIB-ECD may comprise a sequence of SEQ ID NO: 286. In some examples, the mutant soluble ActRIIB-ECD may comprise a sequence of SEQ ID NO: 287. In some examples, the mutant soluble ActRIIB-ECD may comprise a sequence of SEQ ID NO: 288. In some examples, the mutant soluble ActRIIB-ECD may comprise a sequence of SEQ ID NO: 289. In some examples, the mutant soluble ActRIIB-ECD may comprise a sequence of SEQ ID NO: 290. In some examples, the mutant soluble ActRIIB-ECD may comprise a sequence of SEQ ID NO: 291. In some examples, the mutant soluble ActRIIB-ECD may comprise a sequence of SEQ ID NO: 292. In some examples, the mutant soluble ActRIIB-ECD may comprise a sequence of SEQ ID NO: 293. In some examples, the mutant soluble ActRIIB-ECD may comprise a sequence of SEQ ID NO: 294. In some examples, the mutant soluble ActRIIB-ECD may comprise a sequence of SEQ ID NO: 295. In some examples, the mutant soluble ActRIIB-ECD may comprise a sequence of SEQ ID NO: 296. In some examples, the mutant soluble ActRIIB-ECD may comprise a sequence of SEQ ID NO: 297. In some examples, the mutant soluble ActRIIB-ECD may comprise a sequence of SEQ ID NO: 298. In some examples, the mutant soluble ActRIIB-ECD may comprise a sequence of SEQ ID NO: 299. In some examples, the mutant soluble ActRIIB-ECD may comprise a sequence of SEQ ID NO: 300. In some examples, the mutant soluble ActRIIB-ECD may comprise a sequence of SEQ ID NO: 301. In some examples, the mutant soluble ActRIIB-ECD may comprise a sequence of SEQ ID NO: 302. In some examples, the mutant soluble ActRIIB-ECD may comprise a sequence of SEQ ID NO: 303. In some examples, the mutant soluble ActRIIB-ECD may comprise a sequence of SEQ ID NO: 304. In some examples, the mutant soluble ActRIIB-ECD may comprise a sequence of SEQ ID NO: 305. In some examples, the mutant soluble ActRIIB-ECD may comprise a sequence of SEQ ID NO: 306. In some examples, the mutant soluble ActRIIB-ECD may comprise a sequence of SEQ ID NO: 307. In some examples, the mutant soluble ActRIIB-ECD may comprise a sequence of SEQ ID NO: 308. In some examples, the mutant soluble ActRIIB-ECD may comprise a sequence of SEQ ID NO: 309. In some examples, the mutant soluble ActRIIB-ECD may comprise a sequence of SEQ ID NO: 310. In some examples, the mutant soluble ActRIIB-ECD may comprise a sequence of SEQ ID NO: 311. In some examples, the mutant soluble ActRIIB-ECD may comprise a sequence of SEQ ID NO: 312. In some examples, the mutant soluble ActRIIB-ECD may comprise a sequence of SEQ ID NO: 313. In some examples, the mutant soluble ActRIIB-ECD may comprise a sequence of SEQ ID NO: 314. In some examples, the mutant soluble ActRIIB-ECD may comprise a sequence of SEQ ID NO: 315. In some examples, the mutant soluble ActRIIB-ECD may comprise a sequence of SEQ ID NO: 316. In some examples, the mutant soluble ActRIIB-ECD may comprise a sequence of SEQ ID NO: 317. In some examples, the mutant soluble ActRIIB-ECD may comprise a sequence of SEQ ID NO: 318. In some examples, the mutant soluble ActRIIB-ECD may comprise a sequence of SEQ ID NO: 319. In some examples, the mutant soluble ActRIIB-ECD may comprise a sequence of SEQ ID NO: 320. In some examples, the mutant soluble ActRIIB-ECD may comprise a sequence of SEQ ID NO: 321. In some examples, the mutant soluble ActRIIB-ECD may comprise a sequence of SEQ ID NO: 322. In some examples, the mutant soluble ActRIIB-ECD may comprise a sequence of SEQ ID NO: 323. In some examples, the mutant soluble ActRIIB-ECD may comprise a sequence of SEQ ID NO: 324. In some examples, the mutant soluble ActRIIB-ECD may comprise a sequence of SEQ ID NO: 325.

[0146] In some embodiments, the isolated protein may comprise a mutant ActRIIB-ECD may comprise a sequence selected from the group consisting of SEQ ID NOs: 224-325, wherein the mutant ActRIIB-ECD may further comprise from 1 to 6 additional amino acids on the N-terminus of the sequence corresponding to amino acids 1-6 of SEQ ID NO: 46.

[0147] In some examples, the mutant ActRIIB-ECD may comprise a sequence of SEQ ID NOs: 1666, 393, 399, 405, 411, 417, 423, 429, 435, 441, 447, 453, 459, 465, 471, 477, 483, 489, 495, 501, 507, 513, 519, 525, 531, 537, 543, 549, 555, 561, 567, 573, 579, 585, 591, 597, 603, 609, 615, 621, 627, 633, 639, 645, 651, 657, 663, 669, 675, 681, 687, 693, 699, 705, 711, 717, 723, 729, 735, 741, 747, 753, 759, 765, 771, 777, 783, 789, 795, 801, 807, 813, 819, 825, 831, 837, 843, 849, 855, 861, 867, 873, 879, 885, 891, 897, 903, 909, 915, 921, 927, 933, 939, 945, 951, 957, 963, 969, 975, 981, 987, or 993, in which N19 is substituted with another amino acid. For example, the mutant ActRIIB-ECD may comprise a sequence of SEQ ID NO: 1000, 1006, 1012, 1018, 1024, 1030, 1036, 1042, 1048, 1054, 1060, 1066, 1072, 1078, 1084, 1090, 1096, 1102, 1108, 1114, 1120, 1126, 1132, 1138, 1144, 1150, 1156, 1162, 1168, 1174, 1180, 1186, 1192, 1198, 1204, 1210, 1216, 1222, 1228, 1234, 1240, 1246, 1252, 1258, 1264, 1270, 1276, 1282, 1288, 1294, 1300, 1306, 1312, 1318, 1324, 1330, 1336, 1342, 1348, 1354, 1360, 1366, 1372, 1378, 1384, 1390, 1396, 1402, 1408, 1414, 1420, 1426, 1432, 1438, 1444, 1450, 1456, 1462, 1468, 1474, 1480, 1486, 1492, 1498, 1504, 1510, 1516, 1522, 1528, 1534, 1540, 1546, 1552, 1558, 1564, 1570, 1576, 1582, 1588, 1594, 1600, or 1606.

[0148] In some examples, the mutant ActRIIB-ECD may comprise a sequence of SEQ ID NO: 388, 394, 400, 406, 412, 418, 424, 430, 436, 442, 448, 454, 460, 466, 472, 478, 484, 490, 496, 502, 508, 514, 520, 526, 532, 538, 544, 550, 556, 562, 568, 574, 580, 586, 592, 598, 604, 610, 616, 622, 628, 634, 640, 646, 652, 658, 664, 670, 676, 682, 688, 694, 700, 706, 712, 718, 724, 730, 736, 742, 748, 754, 760, 766, 772, 778, 784, 790, 796, 802, 808, 814, 820, 826, 832, 838, 844, 850, 856, 862, 868, 874, 880, 886, 892, 898, 904, 910, 916, 922, 928, 934, 940, 946, 952, 958, 964, 970, 976, 982, 988, or 994, in which N20 is substituted with another amino acid. For example, the mutant ActRIIB-ECD may comprise a sequence of SEQ ID NO: 1001, 1007, 1013, 1019, 1025, 1031, 1037, 1043, 1049, 1055, 1061, 1067, 1073, 1079, 1085, 1091, 1097, 1103, 1109, 1115, 1121, 1127, 1133, 1139, 1145, 1151, 1157, 1163, 1169, 1175, 1181, 1187, 1193, 1199, 1205, 1211, 1217, 1223, 1229, 1235, 1241, 1247, 1253, 1259, 1265, 1271, 1277, 1283, 1289, 1295, 1301, 1307, 1313, 1319, 1325, 1331, 1337, 1343, 1349, 1355, 1361, 1367, 1373, 1379, 1385, 1391, 1397, 1403, 1409, 1415, 1421, 1427, 1433, 1439, 1445, 1451, 1457, 1463, 1469, 1475, 1481, 1487, 1493, 1499, 1505, 1511, 1517, 1523, 1529, 1535, 1541, 1547, 1553, 1559, 1565, 1571, 1577, 1583, 1589, 1595, 1601, or 1607.

[0149] In some examples, the mutant ActRIIB-ECD may comprise a sequence of SEQ ID NO: 389, 395, 401, 407, 413, 419, 425, 431, 437, 443, 449, 455, 461, 467, 473, 479, 485, 491, 497, 503, 509, 515, 521, 527, 533, 539, 545, 551, 557, 563, 569, 575, 581, 587, 593, 599, 605, 611, 617, 623, 629, 635, 641, 647, 653, 659, 665, 671, 677, 683, 689, 695, 701, 707, 713, 719, 725, 731, 737, 743, 749, 755, 761, 767, 773, 779, 785, 791, 797, 803, 809, 815, 821, 827, 833, 839, 845, 851, 857, 863, 869, 875, 881, 887, 893, 899, 905, 911, 917, 923, 929, 935, 941, 947, 953, 959, 965, 971, 977, 983, 989, or 995, in which N21 is substituted with another amino acid. For example, the mutant ActRIIB-ECD may comprise a sequence of SEQ ID NO: 1002, 1008, 1014, 1020, 1026, 1032, 1038, 1044, 1050, 1056, 1062, 1068, 1074, 1080, 1086, 1092, 1098, 1104, 1110, 1116, 1122, 1128, 1134, 1140, 1146, 1152, 1158, 1164, 1170, 1176, 1182, 1188, 1194, 1200, 1206, 1212, 1218, 1224, 1230, 1236, 1242, 1248, 1254, 1260, 1266, 1272, 1278, 1284, 1290, 1296, 1302, 1308, 1314, 1320, 1326, 1332, 1338, 1344, 1350, 1356, 1362, 1368, 1374, 1380, 1386, 1392, 1398, 1404, 1410, 1416, 1422, 1428, 1434, 1440, 1446, 1452, 1458, 1464, 1470, 1476, 1482, 1488, 1494, 1500, 1506, 1512, 1518, 1524, 1530, 1536, 1542, 1548, 1554, 1560, 1566, 1572, 1578, 1584, 1590, 1596, 1602, or 1608.

[0150] In some examples, the mutant ActRIIB-ECD may comprise a sequence of SEQ ID NO: 390, 396, 402, 408, 414, 420, 426, 432, 438, 444, 450, 456, 462, 468, 474, 480, 486, 492, 498, 504, 510, 516, 522, 528, 534, 540, 546, 552, 558, 564, 570, 576, 582, 588, 594, 600, 606, 612, 618, 624, 630, 636, 642, 648, 654, 660, 666, 672, 678, 684, 690, 696, 702, 708, 714, 720, 726, 732, 738, 744, 750, 756, 762, 768, 774, 780, 786, 792, 798, 804, 810, 816, 822, 828, 834, 840, 846, 852, 858, 864, 870, 876, 882, 888, 894, 900, 906, 912, 918, 924, 930, 936, 942, 948, 954, 960, 966, 972, 978, 984, 990, or 996, in which N22 is substituted with another amino acid. For example, the mutant ActRIIB-ECD may comprise a sequence of SEQ ID NO: 1003, 1009, 1015, 1021, 1027, 1033, 1039, 1045, 1051, 1057, 1063, 1069, 1075, 1081, 1087, 1093, 1099, 1105, 1111, 1117, 1123, 1129, 1135, 1141, 1147, 1153, 1159, 1165, 1171, 1177, 1183, 1189, 1195, 1201, 1207, 1213, 1219, 1225, 1231, 1237, 1243, 1249, 1255, 1261, 1267, 1273, 1279, 1285, 1291, 1297, 1303, 1309, 1315, 1321, 1327, 1333, 1339, 1345, 1351, 1357, 1363, 1369, 1375, 1381, 1387, 1393, 1399, 1405, 1411, 1417, 1423, 1429, 1435, 1441, 1447, 1453, 1459, 1465, 1471, 1477, 1483, 1489, 1495, 1501, 1507, 1513, 1519, 1525, 1531, 1537, 1543, 1549, 1555, 1561, 1567, 1573, 1579, 1585, 1591, 1597, 1603, or 1609.

[0151] In some examples, the mutant ActRIIB-ECD may comprise a sequence of SEQ ID NO: 391, 397, 403, 409, 415, 421, 427, 433, 439, 445, 451, 457, 463, 469, 475, 481, 487, 493, 499, 505, 511, 517, 523, 529, 535, 541, 547, 553, 559, 565, 571, 577, 583, 589, 595, 601, 607, 613, 619, 625, 631, 637, 643, 649, 655, 661, 667, 673, 679, 685, 691, 697, 703, 709, 715, 721, 727, 733, 739, 745, 751, 757, 763, 769, 775, 781, 787, 793, 799, 805, 811, 817, 823, 829, 835, 841, 847, 853, 859, 865, 871, 877, 883, 889, 895, 901, 907, 913, 919, 925, 931, 937, 943, 949, 955, 961, 967, 973, 979, 985, 991, or 997, in which N23 is substituted with another amino acid. For example, the mutant ActRIIB-ECD may comprise a sequence of SEQ ID NO: 1004, 1010, 1016, 1022, 1028, 1034, 1040, 1046, 1052, 1058, 1064, 1070, 1076, 1082, 1088, 1094, 1100, 1106, 1112, 1118, 1124, 1130, 1136, 1142, 1148, 1154, 1160, 1166, 1172, 1178, 1184, 1190, 1196, 1202, 1208, 1214, 1220, 1226, 1232, 1238, 1244, 1250, 1256, 1262, 1268, 1274, 1280, 1286, 1292, 1298, 1304, 1310, 1316, 1322, 1328, 1334, 1340, 1346, 1352, 1358, 1364, 1370, 1376, 1382, 1388, 1394, 1400, 1406, 1412, 1418, 1424, 1430, 1436, 1442, 1448, 1454, 1460, 1466, 1472, 1478, 1484, 1490, 1496, 1502, 1508, 1514, 1520, 1526, 1532, 1538, 1544, 1550, 1556, 1562, 1568, 1574, 1580, 1586, 1592, 1598, 1604, or 1610.

[0152] In some examples, the mutant ActRIIB-ECD may comprise a sequence of SEQ ID NO: 392, 398, 404, 410, 416, 422, 428, 434, 440, 446, 452, 458, 464, 470, 476, 482, 488, 494, 500, 506, 512, 518, 524, 530, 536, 542, 548, 554, 560, 566, 572, 578, 584, 590, 596, 602, 608, 614, 620, 626, 632, 638, 644, 650, 656, 662, 668, 674, 680, 686, 692, 698, 704, 710, 716, 722, 728, 734, 740, 746, 752, 758, 764, 770, 776, 782, 788, 794, 800, 806, 812, 818, 824, 830, 836, 842, 848, 854, 860, 866, 872, 878, 884, 890, 896, 902, 908, 914, 920, 926, 932, 938, 944, 950, 956, 962, 968, 974, 980, 986, 992, or 998, in which N24 is substituted with another amino acid. For example, the mutant ActRIIB-ECD may comprise a sequence of SEQ ID NO: 1005, 1011, 1017, 1023, 1029, 1035, 1041, 1047, 1053, 1059, 1065, 1071, 1077, 1083, 1089, 1095, 1101, 1107, 1113, 1119, 1125, 1131, 1137, 1143, 1149, 1155, 1161, 1167, 1173, 1179, 1185, 1191, 1197, 1203, 1209, 1215, 1221, 1227, 1233, 1239, 1245, 1251, 1257, 1263, 1269, 1275, 1281, 1287, 1293, 1299, 1305, 1311, 1317, 1323, 1329, 1335, 1341, 1347, 1353, 1359, 1365, 1371, 1377, 1383, 1389, 1395, 1401, 1407, 1413, 1419, 1425, 1431, 1437, 1443, 1449, 1455, 1461, 1467, 1473, 1479, 1485, 1491, 1497, 1503, 1509, 1515, 1521, 1527, 1533, 1539, 1545, 1551, 1557, 1563, 1569, 1575, 1581, 1587, 1593, 1599, 1605, or 1611.

[0153] In some examples, the mutant ActRIIB-ECD may comprise a sequence of SEQ ID NO: 1666, 393, 399, 405, 411, 417, 423, 429, 435, 441, 447, 453, 459, 465, 471, 477, 483, 489, 495, 501, 507, 513, 519, 525, 531, 537, 543, 549, 555, 561, 567, 573, 579, 585, 591, 597, 603, 609, 615, 621, 627, 633, 639, 645, 651, 657, 663, 669, 675, 681, 687, 693, 699, 705, 711, 717, 723, 729, 735, 741, 747, 753, 759, 765, 771, 777, 783, 789, 795, 801, 807, 813, 819, 825, 831, 837, 843, 849, 855, 861, 867, 873, 879, 885, 891, 897, 903, 909, 915, 921, 927, 933, 939, 945, 951, 957, 963, 969, 975, 981, 987, or 993, in which S21 is substituted with another amino acid other than serine(S) or threonine (T).

[0154] In some examples, the mutant ActRIIB-ECD may comprise a sequence of SEQ ID NO: 388, 394, 400, 406, 412, 418, 424, 430, 436, 442, 448, 454, 460, 466, 472, 478, 484, 490, 496, 502, 508, 514, 520, 526, 532, 538, 544, 550, 556, 562, 568, 574, 580, 586, 592, 598, 604, 610, 616, 622, 628, 634, 640, 646, 652, 658, 664, 670, 676, 682, 688, 694, 700, 706, 712, 718, 724, 730, 736, 742, 748, 754, 760, 766, 772, 778, 784, 790, 796, 802, 808, 814, 820, 826, 832, 838, 844, 850, 856, 862, 868, 874, 880, 886, 892, 898, 904, 910, 916, 922, 928, 934, 940, 946, 952, 958, 964, 970, 976, 982, 988, or 994, in which S22 is substituted with another amino acid other than serine(S) or threonine (T).

[0155] In some examples, the mutant ActRIIB-ECD may comprise a sequence of SEQ ID NO: 389, 395, 401, 407, 413, 419, 425, 431, 437, 443, 449, 455, 461, 467, 473, 479, 485, 491, 497, 503, 509, 515, 521, 527, 533, 539, 545, 551, 557, 563, 569, 575, 581, 587, 593, 599, 605, 611, 617, 623, 629, 635, 641, 647, 653, 659, 665, 671, 677, 683, 689, 695, 701, 707, 713, 719, 725, 731, 737, 743, 749, 755, 761, 767, 773, 779, 785, 791, 797, 803, 809, 815, 821, 827, 833, 839, 845, 851, 857, 863, 869, 875, 881, 887, 893, 899, 905, 911, 917, 923, 929, 935, 941, 947, 953, 959, 965, 971, 977, 983, 989, or 995, in which S23 is substituted with another amino acid other than serine(S) or threonine (T).

[0156] In some examples, the mutant ActRIIB-ECD may comprise a sequence of SEQ ID NO: 390, 396, 402, 408, 414, 420, 426, 432, 438, 444, 450, 456, 462, 468, 474, 480, 486, 492, 498, 504, 510, 516, 522, 528, 534, 540, 546, 552, 558, 564, 570, 576, 582, 588, 594, 600, 606, 612, 618, 624, 630, 636, 642, 648, 654, 660, 666, 672, 678, 684, 690, 696, 702, 708, 714, 720, 726, 732, 738, 744, 750, 756, 762, 768, 774, 780, 786, 792, 798, 804, 810, 816, 822, 828, 834, 840, 846, 852, 858, 864, 870, 876, 882, 888, 894, 900, 906, 912, 918, 924, 930, 936, 942, 948, 954, 960, 966, 972, 978, 984, 990, or 996, in which S24 is substituted with another amino acid other than serine(S) or threonine (T).

[0157] In some examples, the mutant ActRIIB-ECD may comprise a sequence of SEQ ID NO: 391, 397, 403, 409, 415, 421, 427, 433, 439, 445, 451, 457, 463, 469, 475, 481, 487, 493, 499, 505, 511, 517, 523, 529, 535, 541, 547, 553, 559, 565, 571, 577, 583, 589, 595, 601, 607, 613, 619, 625, 631, 637, 643, 649, 655, 661, 667, 673, 679, 685, 691, 697, 703, 709, 715, 721, 727, 733, 739, 745, 751, 757, 763, 769, 775, 781, 787, 793, 799, 805, 811, 817, 823, 829, 835, 841, 847, 853, 859, 865, 871, 877, 883, 889, 895, 901, 907, 913, 919, 925, 931, 937, 943, 949, 955, 961, 967, 973, 979, 985, 991, or 997, in which S25 is substituted with another amino acid other than serine(S) or threonine (T).

[0158] In some examples, the mutant ActRIIB-ECD may comprise a sequence of SEQ ID NO: 392, 398, 404, 410, 416, 422, 428, 434, 440, 446, 452, 458, 464, 470, 476, 482, 488, 494, 500, 506, 512, 518, 524, 530, 536, 542, 548, 554, 560, 566, 572, 578, 584, 590, 596, 602, 608, 614, 620, 626, 632, 638, 644, 650, 656, 662, 668, 674, 680, 686, 692, 698, 704, 710, 716, 722, 728, 734, 740, 746, 752, 758, 764, 770, 776, 782, 788, 794, 800, 806, 812, 818, 824, 830, 836, 842, 848, 854, 860, 866, 872, 878, 884, 890, 896, 902, 908, 914, 920, 926, 932, 938, 944, 950, 956, 962, 968, 974, 980, 986, 992, or 998, in which S26 is substituted with another amino acid other than serine(S) or threonine (T).

[0159] In some embodiments, the mutant soluble ActRIIB-ECD may consist of a sequence of any one of SEQ ID NOs: 3-37 and 51-117, in which the asparagine at position N18 is substituted with another amino acid. In some examples, the mutant soluble ActRIIB-ECD may consist of a sequence of SEQ ID NO: 224. In some examples, the mutant soluble ActRIIB-ECD may consist of a sequence of SEQ ID NO: 225. In some examples, the mutant soluble ActRIIB-ECD may consist of a sequence of SEQ ID NO: 226. In some examples, the mutant soluble ActRIIB-ECD may consist of a sequence of SEQ ID NO: 227. In some examples, the mutant soluble ActRIIB-ECD may consist of a sequence of SEQ ID NO: 228. In some examples, the mutant soluble ActRIIB-ECD may consist of a sequence of SEQ ID NO: 229. In some examples, the mutant soluble ActRIIB-ECD may consist of a sequence of SEQ ID NO: 230. In some examples, the mutant soluble ActRIIB-ECD may consist of a sequence of SEQ ID NO: 231. In some examples, the mutant soluble ActRIIB-ECD may consist of a sequence of SEQ ID NO: 232. In some examples, the mutant soluble ActRIIB-ECD may consist of a sequence of SEQ ID NO: 233. In some examples, the mutant soluble ActRIIB-ECD may consist of a sequence of SEQ ID NO: 234. In some examples, the mutant soluble ActRIIB-ECD may consist of a sequence of SEQ ID NO: 235. In some examples, the mutant soluble ActRIIB-ECD may consist of a sequence of SEQ ID NO: 236. In some examples, the mutant soluble ActRIIB-ECD may consist of a sequence of SEQ ID NO: 237. In some examples, the mutant soluble ActRIIB-ECD may consist of a sequence of SEQ ID NO: 238. In some examples, the mutant soluble ActRIIB-ECD may consist of a sequence of SEQ ID NO: 239. In some examples, the mutant soluble ActRIIB-ECD may consist of a sequence of SEQ ID NO: 240. In some examples, the mutant soluble ActRIIB-ECD may consist of a sequence of SEQ ID NO: 241. In some examples, the mutant soluble ActRIIB-ECD may consist of a sequence of SEQ ID NO: 242. In some examples, the mutant soluble ActRIIB-ECD may consist of a sequence of SEQ ID NO: 243. In some examples, the mutant soluble ActRIIB-ECD may consist of a sequence of SEQ ID NO: 244. In some examples, the mutant soluble ActRIIB-ECD may consist of a sequence of SEQ ID NO: 245. In some examples, the mutant soluble ActRIIB-ECD may consist of a sequence of SEQ ID NO: 246. In some examples, the mutant soluble ActRIIB-ECD may consist of a sequence of SEQ ID NO: 247. In some examples, the mutant soluble ActRIIB-ECD may consist of a sequence of SEQ ID NO: 248. In some examples, the mutant soluble ActRIIB-ECD may consist of a sequence of SEQ ID NO: 249. In some examples, the mutant soluble ActRIIB-ECD may consist of a sequence of SEQ ID NO: 250. In some examples, the mutant soluble ActRIIB-ECD may consist of a sequence of SEQ ID NO: 251. In some examples, the mutant soluble ActRIIB-ECD may consist of a sequence of SEQ ID NO: 252. In some examples, the mutant soluble ActRIIB-ECD may consist of a sequence of SEQ ID NO: 253. In some examples, the mutant soluble ActRIIB-ECD may consist of a sequence of SEQ ID NO: 254. In some examples, the mutant soluble ActRIIB-ECD may consist of a sequence of SEQ ID NO: 255. In some examples, the mutant soluble ActRIIB-ECD may consist of a sequence of SEQ ID NO: 256. In some examples, the mutant soluble ActRIIB-ECD may consist of a sequence of SEQ ID NO: 257. In some examples, the mutant soluble ActRIIB-ECD may consist of a sequence of SEQ ID NO: 258. In some examples, the mutant soluble ActRIIB-ECD may consist of a sequence of SEQ ID NO: 259. In some examples, the mutant soluble ActRIIB-ECD may consist of a sequence of SEQ ID NO: 260. In some examples, the mutant soluble ActRIIB-ECD may consist of a sequence of SEQ ID NO: 261. In some examples, the mutant soluble ActRIIB-ECD may consist of a sequence of SEQ ID NO: 262. In some examples, the mutant soluble ActRIIB-ECD may consist of a sequence of SEQ ID NO: 263. In some examples, the mutant soluble ActRIIB-ECD may consist of a sequence of SEQ ID NO: 264. In some examples, the mutant soluble ActRIIB-ECD may consist of a sequence of SEQ ID NO: 265. In some examples, the mutant soluble ActRIIB-ECD may consist of a sequence of SEQ ID NO: 266. In some examples, the mutant soluble ActRIIB-ECD may consist of a sequence of SEQ ID NO: 267. In some examples, the mutant soluble ActRIIB-ECD may consist of a sequence of SEQ ID NO: 268. In some examples, the mutant soluble ActRIIB-ECD may consist of a sequence of SEQ ID NO: 269. In some examples, the mutant soluble ActRIIB-ECD may consist of a sequence of SEQ ID NO: 270. In some examples, the mutant soluble ActRIIB-ECD may consist of a sequence of SEQ ID NO: 271. In some examples, the mutant soluble ActRIIB-ECD may consist of a sequence of SEQ ID NO: 272. In some examples, the mutant soluble ActRIIB-ECD may consist of a sequence of SEQ ID NO: 273. In some examples, the mutant soluble ActRIIB-ECD may consist of a sequence of SEQ ID NO: 274. In some examples, the mutant soluble ActRIIB-ECD may consist of a sequence of SEQ ID NO: 275. In some examples, the mutant soluble ActRIIB-ECD may consist of a sequence of SEQ ID NO: 276. In some examples, the mutant soluble ActRIIB-ECD may consist of a sequence of SEQ ID NO: 277. In some examples, the mutant soluble ActRIIB-ECD may consist of a sequence of SEQ ID NO: 278. In some examples, the mutant soluble ActRIIB-ECD may consist of a sequence of SEQ ID NO: 279. In some examples, the mutant soluble ActRIIB-ECD may consist of a sequence of SEQ ID NO: 280. In some examples, the mutant soluble ActRIIB-ECD may consist of a sequence of SEQ ID NO: 281. In some examples, the mutant soluble ActRIIB-ECD may consist of a sequence of SEQ ID NO: 282. In some examples, the mutant soluble ActRIIB-ECD may consist of a sequence of SEQ ID NO: 283. In some examples, the mutant soluble ActRIIB-ECD may consist of a sequence of SEQ ID NO: 284. In some examples, the mutant soluble ActRIIB-ECD may consist of a sequence of SEQ ID NO: 285. In some examples, the mutant soluble ActRIIB-ECD may consist of a sequence of SEQ ID NO: 286. In some examples, the mutant soluble ActRIIB-ECD may consist of a sequence of SEQ ID NO: 287. In some examples, the mutant soluble ActRIIB-ECD may consist of a sequence of SEQ ID NO: 288. In some examples, the mutant soluble ActRIIB-ECD may consist of a sequence of SEQ ID NO: 289. In some examples, the mutant soluble ActRIIB-ECD may consist of a sequence of SEQ ID NO: 290. In some examples, the mutant soluble ActRIIB-ECD may consist of a sequence of SEQ ID NO: 291. In some examples, the mutant soluble ActRIIB-ECD may consist of a sequence of SEQ ID NO: 292. In some examples, the mutant soluble ActRIIB-ECD may consist of a sequence of SEQ ID NO: 293. In some examples, the mutant soluble ActRIIB-ECD may consist of a sequence of SEQ ID NO: 294. In some examples, the mutant soluble ActRIIB-ECD may consist of a sequence of SEQ ID NO: 295. In some examples, the mutant soluble ActRIIB-ECD may consist of a sequence of SEQ ID NO: 296. In some examples, the mutant soluble ActRIIB-ECD may consist of a sequence of SEQ ID NO: 297. In some examples, the mutant soluble ActRIIB-ECD may consist of a sequence of SEQ ID NO: 298. In some examples, the mutant soluble ActRIIB-ECD may consist of a sequence of SEQ ID NO: 299. In some examples, the mutant soluble ActRIIB-ECD may consist of a sequence of SEQ ID NO: 300. In some examples, the mutant soluble ActRIIB-ECD may consist of a sequence of SEQ ID NO: 301. In some examples, the mutant soluble ActRIIB-ECD may consist of a sequence of SEQ ID NO: 302. In some examples, the mutant soluble ActRIIB-ECD may consist of a sequence of SEQ ID NO: 303. In some examples, the mutant soluble ActRIIB-ECD may consist of a sequence of SEQ ID NO: 304. In some examples, the mutant soluble ActRIIB-ECD may consist of a sequence of SEQ ID NO: 305. In some examples, the mutant soluble ActRIIB-ECD may consist of a sequence of SEQ ID NO: 306. In some examples, the mutant soluble ActRIIB-ECD may consist of a sequence of SEQ ID NO: 307. In some examples, the mutant soluble ActRIIB-ECD may consist of a sequence of SEQ ID NO: 308. In some examples, the mutant soluble ActRIIB-ECD may consist of a sequence of SEQ ID NO: 309. In some examples, the mutant soluble ActRIIB-ECD may consist of a sequence of SEQ ID NO: 310. In some examples, the mutant soluble ActRIIB-ECD may consist of a sequence of SEQ ID NO: 311. In some examples, the mutant soluble ActRIIB-ECD may consist of a sequence of SEQ ID NO: 312. In some examples, the mutant soluble ActRIIB-ECD may consist of a sequence of SEQ ID NO: 313. In some examples, the mutant soluble ActRIIB-ECD may consist of a sequence of SEQ ID NO: 314. In some examples, the mutant soluble ActRIIB-ECD may consist of a sequence of SEQ ID NO: 315. In some examples, the mutant soluble ActRIIB-ECD may consist of a sequence of SEQ ID NO: 316. In some examples, the mutant soluble ActRIIB-ECD may consist of a sequence of SEQ ID NO: 317. In some examples, the mutant soluble ActRIIB-ECD may consist of a sequence of SEQ ID NO: 318. In some examples, the mutant soluble ActRIIB-ECD may consist of a sequence of SEQ ID NO: 319. In some examples, the mutant soluble ActRIIB-ECD may consist of a sequence of SEQ ID NO: 320. In some examples, the mutant soluble ActRIIB-ECD may consist of a sequence of SEQ ID NO: 321. In some examples, the mutant soluble ActRIIB-ECD may consist of a sequence of SEQ ID NO: 322. In some examples, the mutant soluble ActRIIB-ECD may consist of a sequence of SEQ ID NO: 323. In some examples, the mutant soluble ActRIIB-ECD may consist of a sequence of SEQ ID NO: 324. In some examples, the mutant soluble ActRIIB-ECD may consist of a sequence of SEQ ID NO: 325.

[0160] In some examples, in any of SEQ ID NOs: 224-325, the asparagine at position N18 may be substituted with an alanine. In some examples, in any of SEQ ID NOs: 224-325, the asparagine at position N18 may be substituted with an arginine. In some examples, in any of SEQ ID NOs: 224-325, the asparagine at position N18 may be substituted with an aspartate. In some examples, in any of SEQ ID NOs: 224-325, the asparagine at position N18 may be substituted with a cysteine. In some examples, in any of SEQ ID NOs: 224-325, the asparagine at position N18 may be substituted with a glutamate. In some examples, in any of SEQ ID NOs: 224-325, the asparagine at position N18 may be substituted with a glycine. In some examples, in any of SEQ ID NOs: 224-325, the asparagine at position N18 may be substituted with a histidine. In some examples, in any of SEQ ID NOs: 224-325, the asparagine at position N18 may be substituted with an isoleucine. In some examples, in any of SEQ ID NOs: 224-325, the asparagine at position N18 may be substituted with a leucine. In some examples, in any of SEQ ID NOs: 224-325, the asparagine at position N18 may be substituted with a lysine. In some examples, in any of SEQ ID NOs: 224-325, the asparagine at position N18 may be substituted with a methionine. In some examples, in any of SEQ ID NOs: 224-325, the asparagine at position N18 may be substituted with a phenylalanine. In some examples, in any of SEQ ID NOs: 224-325, the asparagine at position N18 may be substituted with a proline. In some examples, in any of SEQ ID NOs: 224-325, the asparagine at position N18 may be substituted with a serine. In some examples, in any of SEQ ID NOs: 224-325, the asparagine at position N18 may be substituted with a threonine. In some examples, in any of SEQ ID NOs: 224-325, the asparagine at position N18 may be substituted with a tryptophan. In some examples, in any of SEQ ID NOs: 224-325, the asparagine at position N18 may be substituted with a tyrosine. In some examples, in any of SEQ ID NOs: 224-325, the asparagine at position N18 may be substituted with a valine.

[0161] In some examples, the mutant soluble ActRIIB-ECD may comprise a sequence at least 80% (e.g., at least 85%, 90%, 95%, 96%, 97%, or 98%) identical to any one of SEQ ID NOs: 3-37 and 51-117, in which the asparagine at position N18 is substituted with another amino acid. For example, the mutant soluble ActRIIB-ECD may comprise a sequence at least 95% identical to any one of SEQ ID NOs: 3-37 and 51-117, in which the asparagine at position N18 is substituted with another amino acid.

[0162] In some examples, the mutant soluble ActRIIB-ECD may comprise a sequence at least 95% identical to SEQ ID NO: 3, in which the asparagine at position N18 is substituted with another amino acid. In some examples, the mutant soluble ActRIIB-ECD may comprise a sequence at least 95% identical to SEQ ID NO: 4, in which the asparagine at position N18 is substituted with another amino acid. In some examples, the mutant soluble ActRIIB-ECD may comprise a sequence at least 95% identical to SEQ ID NO: 5, in which the asparagine at position N18 is substituted with another amino acid. In some examples, the mutant soluble ActRIIB-ECD may comprise a sequence at least 95% identical to SEQ ID NO: 6, in which the asparagine at position N18 is substituted with another amino acid. In some examples, the mutant soluble ActRIIB-ECD may comprise a sequence at least 95% identical to SEQ ID NO: 7, in which the asparagine at position N18 is substituted with another amino acid. In some examples, the mutant soluble ActRIIB-ECD may comprise a sequence at least 95% identical to SEQ ID NO: 8, in which the asparagine at position N18 is substituted with another amino acid. In some examples, the mutant soluble ActRIIB-ECD may comprise a sequence at least 95% identical to SEQ ID NO: 9, in which the asparagine at position N18 is substituted with another amino acid. In some examples, the mutant soluble ActRIIB-ECD may comprise a sequence at least 95% identical to SEQ ID NO: 10, in which the asparagine at position N18 is substituted with another amino acid. In some examples, the mutant soluble ActRIIB-ECD polypeptide may comprise a sequence at least 95% identical to SEQ ID NO: 11, in which the asparagine at position N18 is substituted with another amino acid. In some examples, the mutant soluble ActRIIB-ECD polypeptide may comprise a sequence at least 95% identical to SEQ ID NO: 12, in which the asparagine at position N18 is substituted with another amino acid. In some examples, the mutant soluble ActRIIB-ECD polypeptide may comprise a sequence at least 95% identical to SEQ ID NO: 13, in which the asparagine at position N18 is substituted with another amino acid. In some examples, the mutant soluble ActRIIB-ECD polypeptide may comprise a sequence at least 95% identical to SEQ ID NO: 14, in which the asparagine at position N18 is substituted with another amino acid. In some examples, the mutant soluble ActRIIB-ECD polypeptide may comprise a sequence at least 95% identical to SEQ ID NO: 15, in which the asparagine at position N18 is substituted with another amino acid. In some examples, the mutant soluble ActRIIB-ECD polypeptide may comprise a sequence at least 95% identical to SEQ ID NO: 16, in which the asparagine at position N18 is substituted with another amino acid. In some examples, the mutant soluble ActRIIB-ECD polypeptide may comprise a sequence at least 95% identical to SEQ ID NO: 17, in which the asparagine at position N18 is substituted with another amino acid. In some examples, the mutant soluble ActRIIB-ECD polypeptide may comprise a sequence at least 95% identical to SEQ ID NO: 18, in which the asparagine at position N18 is substituted with another amino acid. In some examples, the mutant soluble ActRIIB-ECD polypeptide may comprise a sequence at least 95% identical to SEQ ID NO: 19, in which the asparagine at position N18 is substituted with another amino acid. In some examples, the mutant soluble ActRIIB-ECD polypeptide may comprise a sequence at least 95% identical to SEQ ID NO: 21, in which the soluble ActRIIB-ECD polypeptide may comprise a sequence at least 95% identical to SEQ ID NO: 22, in which the asparagine at position N18 is substituted with another amino acid. In some examples, the mutant soluble ActRIIB-ECD polypeptide may comprise a sequence at least 95% identical to SEQ ID NO: 23, in which the asparagine at position N18 is substituted with another amino acid. In some examples, the mutant soluble ActRIIB-ECD polypeptide may comprise a sequence at least 95% identical to SEQ ID NO: 24, in which the asparagine at position N18 is substituted with another amino acid. In some examples, the mutant soluble ActRIIB-ECD polypeptide may comprise a sequence at least 95% identical to SEQ ID NO: 25, in which the asparagine at position N18 is substituted with another amino acid. In some examples, the mutant soluble ActRIIB-ECD polypeptide may comprise a sequence at least 95% identical to SEQ ID NO: 26, in which the asparagine at position N18 is substituted with another amino acid. In some examples, the mutant soluble ActRIIB-ECD polypeptide may comprise a sequence at least 95% identical to SEQ ID NO: 27, in which the asparagine at position N18 is substituted with another amino acid. In some examples, the mutant soluble ActRIIB-ECD polypeptide may comprise a sequence at least 95% identical to SEQ ID NO: 28, in which the asparagine at position N18 is substituted with another amino acid. In some examples, the mutant soluble ActRIIB-ECD polypeptide may comprise a sequence at least 95% identical to SEQ ID NO: 29, in which the asparagine at position N18 is substituted with another amino acid. In some examples, the mutant soluble ActRIIB-ECD polypeptide may comprise a sequence at least 95% identical to SEQ ID NO: 30, in which the asparagine at position N18 is substituted with another amino acid. In some examples, the mutant soluble ActRIIB-ECD polypeptide may comprise a sequence at least 95% identical to SEQ ID NO: 31, in which the asparagine at position N18 is substituted with another amino acid. In some examples, the mutant soluble ActRIIB-ECD polypeptide may comprise a sequence at least 95% identical to SEQ ID NO: 32, in which the asparagine at position N18 is substituted with another amino acid. In some examples, the mutant soluble ActRIIB-ECD polypeptide may comprise a sequence at least 95% identical to SEQ ID NO: 33, in which the asparagine at position N18 is substituted with another amino acid. In some examples, the mutant soluble ActRIIB-ECD polypeptide may comprise a sequence at least 95% identical to SEQ ID NO: 34, in which the asparagine at position N18 is substituted with another amino acid. In some examples, the mutant soluble ActRIIB-ECD polypeptide may comprise a sequence at least 95% identical to SEQ ID NO: 35, in which the asparagine at position N18 is substituted with another amino acid. In some examples, the mutant soluble ActRIIB-ECD polypeptide may comprise a mutant of a sequence at least 95% identical to SEQ ID NO: 36, in which the asparagine at position N18 is substituted with another amino acid. In some examples, the mutant soluble ActRIIB-ECD polypeptide may comprise a sequence at least 95% identical to SEQ ID NO: 37, in which the asparagine at position N18 is substituted with another amino acid. In some examples, the mutant soluble ActRIIB-ECD polypeptide may comprise a sequence at least 95% identical to SEQ ID NO: 51, in which the asparagine at position N18 is substituted with another amino acid. In some examples, the mutant soluble ActRIIB-ECD polypeptide may comprise a sequence at least 95% identical to SEQ ID NO: 52, in which the asparagine at position N18 is substituted with another amino acid. In some examples, the mutant soluble ActRIIB-ECD polypeptide may comprise a sequence at least 95% identical to SEQ ID NO: 53, in which the asparagine at position N18 is substituted with another amino acid. In some examples, the mutant soluble ActRIIB-ECD polypeptide may comprise a sequence at least 95% identical to SEQ ID NO: 54, in which the asparagine at position N18 is substituted with another amino acid. In some examples, the mutant soluble ActRIIB-ECD polypeptide may comprise a sequence at least 95% identical to SEQ ID NO: 55, in which the asparagine at position N18 is substituted with another amino acid. In some examples, the mutant soluble ActRIIB-ECD polypeptide may comprise a sequence at least 95% identical to SEQ ID NO: 56, in which the asparagine at position N18 is substituted with another amino acid. In some examples, the mutant soluble ActRIIB-ECD polypeptide may comprise a sequence at least 95% identical to SEQ ID NO: 57, in which the asparagine at position N18 is substituted with another amino acid. In some examples, the mutant soluble ActRIIB-ECD polypeptide may comprise a sequence at least 95% identical to SEQ ID NO: 58, in which the asparagine at position N18 is substituted with another amino acid. In some examples, the mutant soluble ActRIIB-ECD polypeptide may comprise a sequence at least 95% identical to SEQ ID NO: 59, in which the asparagine at position N18 is substituted with another amino acid. In some examples, the mutant soluble ActRIIB-ECD polypeptide may comprise a sequence at least 95% identical to SEQ ID NO: 60, in which the asparagine at position N18 is substituted with another amino acid. In some examples, the mutant soluble ActRIIB-ECD polypeptide may comprise a sequence at least 95% identical to SEQ ID NO: 61, in which the asparagine at position N18 is substituted with another amino acid. In some examples, the mutant soluble ActRIIB-ECD polypeptide may comprise a sequence at least 95% identical to SEQ ID NO: 62, in which the asparagine at position N18 is substituted with another amino acid. In some examples, the mutant soluble ActRIIB-ECD polypeptide may comprise a sequence at least 95% identical to SEQ ID NO: 63, in which the asparagine at position N18 is substituted with another amino acid. In some examples, the mutant soluble ActRIIB-ECD polypeptide may comprise a sequence at least 95% identical to SEQ ID NO: 64, in which the asparagine at position N18 is substituted with another amino acid. In some examples, the mutant soluble ActRIIB-ECD polypeptide may comprise a sequence at least 95% identical to SEQ ID NO: 65, in which the asparagine at position N18 is substituted with another amino acid. In some examples, the mutant soluble ActRIIB-ECD polypeptide may comprise a sequence at least 95% identical to SEQ ID NO: 66, in which the asparagine at position N18 is substituted with another amino acid. In some examples, the mutant soluble ActRIIB-ECD polypeptide may comprise a sequence at least 95% identical to SEQ ID NO: 67, in which the asparagine at position N18 is substituted with another amino acid. In some examples, the mutant soluble ActRIIB-ECD polypeptide may comprise a sequence at least 95% identical to SEQ ID NO: 68, in which the asparagine at position N18 is substituted with another amino acid. In some examples, the mutant soluble ActRIIB-ECD polypeptide may comprise a sequence at least 95% identical to SEQ ID NO: 69, in which the asparagine at position N18 is substituted with another amino acid. In some examples, the mutant soluble ActRIIB-ECD polypeptide may comprise a sequence at least 95% identical to SEQ ID NO: 70, in which the asparagine at position N18 is substituted with another amino acid. In some examples, the mutant soluble ActRIIB-ECD polypeptide may comprise a sequence at least 95% identical to SEQ ID NO: 71, in which the asparagine at position N18 is substituted with another amino acid. In some examples, the mutant soluble ActRIIB-ECD polypeptide may comprise a sequence at least 95% identical to SEQ ID NO: 72, in which the asparagine at position N18 is substituted with another amino acid. In some examples, the mutant soluble ActRIIB-ECD polypeptide may comprise a sequence at least 95% identical to SEQ ID NO: 73, in which the asparagine at position N18 is substituted with another amino acid. In some examples, the mutant soluble ActRIIB-ECD polypeptide may comprise a sequence at least 95% identical to SEQ ID NO: 74, in which the soluble ActRIIB-ECD polypeptide may comprise a sequence at least 95% identical to SEQ ID NO: 75, in which the asparagine at position N18 is substituted with another amino acid. In some examples, the mutant soluble ActRIIB-ECD polypeptide may comprise a sequence at least 95% identical to SEQ ID NO: 76, in which the asparagine at position N18 is substituted with another amino acid. In some examples, the mutant soluble ActRIIB-ECD polypeptide may comprise a sequence at least 95% identical to SEQ ID NO: 77, in which the asparagine at position N18 is substituted with another amino acid. In some examples, the mutant soluble ActRIIB-ECD polypeptide may comprise a sequence at least 95% identical to SEQ ID NO: 78, in which the asparagine at position N18 is substituted with another amino acid. In some examples, the mutant soluble ActRIIB-ECD polypeptide may comprise a sequence at least 95% identical to SEQ ID NO: 79, in which the asparagine at position N18 is substituted with another amino acid. In some examples, the mutant soluble ActRIIB-ECD polypeptide may comprise a sequence at least 95% identical to SEQ ID NO: 80, in which the asparagine at position N18 is substituted with another amino acid. In some examples, the mutant soluble ActRIIB-ECD polypeptide may comprise a sequence at least 95% identical to SEQ ID NO: 81, in which the asparagine at position N18 is substituted with another amino acid. In some examples, the mutant soluble ActRIIB-ECD polypeptide may comprise a sequence at least 95% identical to SEQ ID NO: 82, in which the asparagine at position N18 is substituted with another amino acid. In some examples, the mutant soluble ActRIIB-ECD polypeptide may comprise a sequence at least 95% identical to SEQ ID NO: 83, in which the asparagine at position N18 is substituted with another amino acid. In some examples, the mutant soluble ActRIIB-ECD polypeptide may comprise a sequence at least 95% identical to SEQ ID NO: 84, in which the asparagine at position N18 is substituted with another amino acid. In some examples, the mutant soluble ActRIIB-ECD polypeptide may comprise a sequence at least 95% identical to SEQ ID NO: 85, in which the asparagine at position N18 is substituted with another amino acid. In some examples, the mutant soluble ActRIIB-ECD polypeptide may comprise a sequence at least 95% identical to SEQ ID NO: 86, in which the asparagine at position N18 is substituted with another amino acid. In some examples, the mutant soluble ActRIIB-ECD polypeptide may comprise a sequence at least 95% identical to SEQ ID NO: 87, in which the asparagine at position N18 is substituted with another amino acid. In some examples, the mutant soluble ActRIIB-ECD polypeptide may comprise a sequence at least 95% identical to SEQ ID NO: 88, in which the asparagine at position N18 is substituted with another amino acid. In some examples, the mutant soluble ActRIIB-ECD polypeptide may comprise a sequence at least 95% identical to SEQ ID NO: 89, in which the asparagine at position N18 is substituted with another amino acid. In some examples, the mutant soluble ActRIIB-ECD polypeptide may comprise a sequence at least 95% identical to SEQ ID NO: 90, in which the asparagine at position N18 is substituted with another amino acid. In some examples, the mutant soluble ActRIIB-ECD polypeptide may comprise a sequence at least 95% identical to SEQ ID NO: 91, in which the asparagine at position N18 is substituted with another amino acid. In some examples, the mutant soluble ActRIIB-ECD polypeptide may comprise a sequence at least 95% identical to SEQ ID NO: 92, in which the asparagine at position N18 is substituted with another amino acid. In some examples, the mutant soluble ActRIIB-ECD polypeptide may comprise a sequence at least 95% identical to SEQ ID NO: 93, in which the asparagine at position N18 is substituted with another amino acid. In some examples, the mutant soluble ActRIIB-ECD polypeptide may comprise a sequence at least 95% identical to SEQ ID NO: 94, in which the asparagine at position N18 is substituted with another amino acid. In some examples, the mutant soluble ActRIIB-ECD polypeptide may comprise a sequence at least 95% identical to SEQ ID NO: 95, in which the asparagine at position N18 is substituted with another amino acid. In some examples, the mutant soluble ActRIIB-ECD polypeptide may comprise a sequence at least 95% identical to SEQ ID NO: 96, in which the asparagine at position N18 is substituted with another amino acid. In some examples, the mutant soluble ActRIIB-ECD polypeptide may comprise a sequence at least 95% identical to SEQ ID NO: 97, in which the asparagine at position N18 is substituted with another amino acid. In some examples, the mutant soluble ActRIIB-ECD polypeptide may comprise a sequence at least 95% identical to SEQ ID NO: 98, in which the asparagine at position N18 is substituted with another amino acid. In some examples, the mutant soluble ActRIIB-ECD polypeptide may comprise a sequence at least 95% identical to SEQ ID NO: 99, in which the asparagine at position N18 is substituted with another amino acid. In some examples, the mutant soluble ActRIIB-ECD polypeptide may comprise a sequence at least 95% identical to SEQ ID NO: 100, in which the asparagine at position N18 is substituted with another amino acid. In some examples, the mutant soluble ActRIIB-ECD polypeptide may comprise a sequence at least 95% identical to SEQ ID NO: 101, in which the asparagine at position N18 is substituted with another amino acid. In some examples, the mutant soluble ActRIIB-ECD polypeptide may comprise a sequence at least 95% identical to SEQ ID NO: 102, in which the asparagine at position N18 is substituted with another amino acid. In some examples, the mutant soluble ActRIIB-ECD polypeptide may comprise a sequence at least 95% identical to SEQ ID NO: 103, in which the asparagine at position N18 is substituted with another amino acid. In some examples, the mutant soluble ActRIIB-ECD polypeptide may comprise a sequence at least 95% identical to SEQ ID NO: 104, in which the asparagine at position N18 is substituted with another amino acid. In some examples, the mutant soluble ActRIIB-ECD polypeptide may comprise a sequence at least 95% identical to SEQ ID NO: 105, in which the asparagine at position N18 is substituted with another amino acid. In some examples, the mutant soluble ActRIIB-ECD polypeptide may comprise a sequence at least 95% identical to SEQ ID NO: 106, in which the asparagine at position N18 is substituted with another amino acid. In some examples, the mutant soluble ActRIIB-ECD polypeptide may comprise a sequence at least 95% identical to SEQ ID NO: 107, in which the asparagine at position N18 is substituted with another amino acid. In some examples, the mutant soluble ActRIIB-ECD polypeptide may comprise a sequence at least 95% identical to SEQ ID NO: 108, in which the asparagine at position N18 is substituted with another amino acid. In some examples, the mutant soluble ActRIIB-ECD polypeptide may comprise a sequence at least 95% identical to SEQ ID NO: 109, in which the asparagine at position N18 is substituted with another amino acid. In some examples, the mutant soluble ActRIIB-ECD polypeptide may comprise a sequence at least 95% identical to SEQ ID NO: 110, in which the asparagine at position N18 is substituted with another amino acid. In some examples, the mutant soluble ActRIIB-ECD polypeptide may comprise a sequence at least 95% identical to SEQ ID NO: 111, in which the asparagine at position N18 is substituted with another amino acid. In some examples, the mutant soluble ActRIIB-ECD polypeptide may comprise a sequence at least 95% identical to SEQ ID NO: 112, in which the asparagine at position N18 is substituted with another amino acid. In some examples, the mutant soluble ActRIIB-ECD polypeptide may comprise a sequence at least 95% identical to SEQ ID NO: 113, in which the asparagine at position N18 is substituted with another amino acid. In some examples, the mutant soluble ActRIIB-ECD polypeptide may comprise a sequence at least 95% identical to SEQ ID NO: 114, in which the soluble ActRIIB-ECD polypeptide may comprise a sequence at least 95% identical to SEQ ID NO: 115, in which the asparagine at position N18 is substituted with another amino acid. In some examples, the mutant soluble ActRIIB-ECD polypeptide may comprise a sequence at least 95% identical to SEQ ID NO: 116, in which the asparagine at position N18 is substituted with another amino acid. In some examples, the mutant soluble ActRIIB-ECD polypeptide may comprise a sequence at least 95% identical to SEQ ID NO: 117, in which the asparagine at position N18 is substituted with another amino acid.

[0163] In some embodiments, in the mutant soluble ActRIIB-ECD that has the additional mutation(s), the asparagine at the position corresponding to N18 of SEQ ID NO: 1 is substituted with a glutamine. In some examples, the mutant soluble ActRIIB-ECD may comprise a sequence at least 80% (e.g., at least 85%, 90%, 95%, 96%, 97%, or 98%) identical to any one of SEQ ID NOs: 3-37 and 51-117, in which the asparagine at position N18 is substituted with glutamine. For example, the mutant soluble ActRIIB-ECD may comprise a sequence at least 95% identical to any one of SEQ ID NOs: 3-37 and 51-117, in which the asparagine at position N18 is substituted with glutamine.

[0164] In some examples, the mutant soluble ActRIIB-ECD may comprise a sequence at least 95% identical to SEQ ID NO: 3, in which the asparagine at position N18 is substituted with glutamine. In some examples, the mutant soluble ActRIIB-ECD may comprise a sequence at least 95% identical to SEQ ID NO: 4, in which the asparagine at position N18 is substituted with glutamine. In some examples, the mutant soluble ActRIIB-ECD may comprise a sequence at least 95% identical to SEQ ID NO: 5, in which the asparagine at position N18 is substituted with glutamine. In some examples, the mutant soluble ActRIIB-ECD may comprise a sequence at least 95% identical to SEQ ID NO: 6, in which the asparagine at position N18 is substituted with glutamine. In some examples, the mutant soluble ActRIIB-ECD may comprise a sequence at least 95% identical to SEQ ID NO: 7, in which the asparagine at position N18 is substituted with glutamine. In some examples, the mutant soluble ActRIIB-ECD may comprise a sequence at least 95% identical to SEQ ID NO: 8, in which the asparagine at position N18 is substituted with glutamine. In some examples, the mutant soluble ActRIIB-ECD may comprise a sequence at least 95% identical to SEQ ID NO: 9, in which the asparagine at position N18 is substituted with glutamine. In some examples, the mutant soluble ActRIIB-ECD may comprise a sequence at least 95% identical to SEQ ID NO: 10, in which the asparagine at position N18 is substituted with glutamine. In some examples, the mutant soluble ActRIIB-ECD polypeptide may comprise a sequence at least 95% identical to SEQ ID NO: 11, in which the asparagine at position N18 is substituted with glutamine. In some examples, the mutant soluble ActRIIB-ECD polypeptide may comprise a sequence at least 95% identical to SEQ ID NO: 12, in which the asparagine at position N18 is substituted with glutamine. In some examples, the mutant soluble ActRIIB-ECD polypeptide may comprise a sequence at least 95% identical to SEQ ID NO: 13, in which the asparagine at position N18 is substituted with glutamine. In some examples, the mutant soluble ActRIIB-ECD polypeptide may comprise a sequence at least 95% identical to SEQ ID NO: 14, in which the asparagine at position N18 is substituted with glutamine. In some examples, the mutant soluble ActRIIB-ECD polypeptide may comprise a sequence at least 95% identical to SEQ ID NO: 15, in which the asparagine at position N18 is substituted with glutamine. In some examples, the mutant soluble ActRIIB-ECD polypeptide may comprise a sequence at least 95% identical to SEQ ID NO: 16, in which the asparagine at position N18 is substituted with glutamine. In some examples, the mutant soluble ActRIIB-ECD polypeptide may comprise a sequence at least 95% identical to SEQ ID NO: 17, in which the asparagine at position N18 is substituted with glutamine. In some examples, the mutant soluble ActRIIB-ECD polypeptide may comprise a sequence at least 95% identical to SEQ ID NO: 18, in which the asparagine at position N18 is substituted with glutamine. In some examples, the mutant soluble ActRIIB-ECD polypeptide may comprise a sequence at least 95% identical to SEQ ID NO: 19, in which the asparagine at position N18 is substituted with glutamine. In some examples, the mutant soluble ActRIIB-ECD polypeptide may comprise a sequence at least 95% identical to SEQ ID NO: 21, in which the asparagine at position N18 is substituted with glutamine. In some examples, the mutant soluble ActRIIB-ECD polypeptide may comprise a sequence at least 95% identical to SEQ ID NO: 22, in which the asparagine at position N18 is substituted with glutamine. In some examples, the mutant soluble ActRIIB-ECD polypeptide may comprise a sequence at least 95% identical to SEQ ID NO: 23, in which the asparagine at position N18 is substituted with glutamine. In some examples, the mutant soluble ActRIIB-ECD polypeptide may comprise a sequence at least 95% identical to SEQ ID NO: 24, in which the asparagine at position N18 is substituted with glutamine. In some examples, the mutant soluble ActRIIB-ECD polypeptide may comprise a sequence at least 95% identical to SEQ ID NO: 25, in which the asparagine at position N18 is substituted with glutamine. In some examples, the mutant soluble ActRIIB-ECD polypeptide may comprise a sequence at least 95% identical to SEQ ID NO: 26, in which the asparagine at position N18 is substituted with glutamine. In some examples, the mutant soluble ActRIIB-ECD polypeptide may comprise a sequence at least 95% identical to SEQ ID NO: 27, in which the asparagine at position N18 is substituted with glutamine. In some examples, the mutant soluble ActRIIB-ECD polypeptide may comprise a sequence at least 95% identical to SEQ ID NO: 28, in which the asparagine at position N18 is substituted with glutamine. In some examples, the mutant soluble ActRIIB-ECD polypeptide may comprise a sequence at least 95% identical to SEQ ID NO: 29, in which the asparagine at position N18 is substituted with glutamine. In some examples, the mutant soluble ActRIIB-ECD polypeptide may comprise a sequence at least 95% identical to SEQ ID NO: 30, in which the asparagine at position N18 is substituted with glutamine. In some examples, the mutant soluble ActRIIB-ECD polypeptide may comprise a sequence at least 95% identical to SEQ ID NO: 31, in which the asparagine at position N18 is substituted with glutamine. In some examples, the mutant soluble ActRIIB-ECD polypeptide may comprise a sequence at least 95% identical to SEQ ID NO: 32, in which the asparagine at position N18 is substituted with glutamine. In some examples, the mutant soluble ActRIIB-ECD polypeptide may comprise a sequence at least 95% identical to SEQ ID NO: 33, in which the asparagine at position N18 is substituted with glutamine. In some examples, the mutant soluble ActRIIB-ECD polypeptide may comprise a sequence at least 95% identical to SEQ ID NO: 34, in which the asparagine at position N18 is substituted with another amino acid. In some examples, the mutant soluble ActRIIB-ECD polypeptide may comprise a sequence at least 95% identical to SEQ ID NO: 35, in which the asparagine at position N18 is substituted with glutamine. In some examples, the mutant soluble ActRIIB-ECD polypeptide may comprise a mutant of a sequence at least 95% identical to SEQ ID NO: 36, in which the asparagine at position N18 is substituted with glutamine. In some examples, the mutant soluble ActRIIB-ECD polypeptide may comprise a sequence at least 95% identical to SEQ ID NO: 37, in which the asparagine at position N18 is substituted with glutamine. In some examples, the mutant soluble ActRIIB-ECD polypeptide may comprise a sequence at least 95% identical to SEQ ID NO: 51, in which the asparagine at position N18 is substituted with glutamine. In some examples, the mutant soluble ActRIIB-ECD polypeptide may comprise a sequence at least 95% identical to SEQ ID NO: 52, in which the asparagine at position N18 is substituted with glutamine. In some examples, the mutant soluble ActRIIB-ECD polypeptide may comprise a sequence at least 95% identical to SEQ ID NO: 53, in which the asparagine at position N18 is substituted with glutamine. In some examples, the mutant soluble ActRIIB-ECD polypeptide may comprise a sequence at least 95% identical to SEQ ID NO: 54, in which the asparagine at position N18 is substituted with glutamine. In some examples, the mutant soluble ActRIIB-ECD polypeptide may comprise a sequence at least 95% identical to SEQ ID NO: 55, in which the asparagine at position N18 is substituted with glutamine. In some examples, the mutant soluble ActRIIB-ECD polypeptide may comprise a sequence at least 95% identical to SEQ ID NO: 56, in which the asparagine at position N18 is substituted with glutamine. In some examples, the mutant soluble ActRIIB-ECD polypeptide may comprise a sequence at least 95% identical to SEQ ID NO: 57, in which the asparagine at position N18 is substituted with glutamine. In some examples, the mutant soluble ActRIIB-ECD polypeptide may comprise a sequence at least 95% identical to SEQ ID NO: 58, in which the asparagine at position N18 is substituted with glutamine. In some examples, the mutant soluble ActRIIB-ECD polypeptide may comprise a sequence at least 95% identical to SEQ ID NO: 59, in which the asparagine at position N18 is substituted with glutamine. In some examples, the mutant soluble ActRIIB-ECD polypeptide may comprise a sequence at least 95% identical to SEQ ID NO: 60, in which the asparagine at position N18 is substituted with glutamine. In some examples, the mutant soluble ActRIIB-ECD polypeptide may comprise a sequence at least 95% identical to SEQ ID NO: 61, in which the asparagine at position N18 is substituted with glutamine. In some examples, the mutant soluble ActRIIB-ECD polypeptide may comprise a sequence at least 95% identical to SEQ ID NO: 62, in which the asparagine at position N18 is substituted with glutamine. In some examples, the mutant soluble ActRIIB-ECD polypeptide may comprise a sequence at least 95% identical to SEQ ID NO: 63, in which the asparagine at position N18 is substituted with glutamine. In some examples, the mutant soluble ActRIIB-ECD polypeptide may comprise a sequence at least 95% identical to SEQ ID NO: 64, in which the asparagine at position N18 is substituted with glutamine. In some examples, the mutant soluble ActRIIB-ECD polypeptide may comprise a sequence at least 95% identical to SEQ ID NO: 65, in which the asparagine at position N18 is substituted with glutamine. In some examples, the mutant soluble ActRIIB-ECD polypeptide may comprise a sequence at least 95% identical to SEQ ID NO: 66, in which the asparagine at position N18 is substituted with another amino acid In some examples, the mutant soluble ActRIIB-ECD polypeptide may comprise a sequence at least 95% identical to SEQ ID NO: 67, in which the asparagine at position N18 is substituted with glutamine. In some examples, the mutant soluble ActRIIB-ECD polypeptide may comprise a sequence at least 95% identical to SEQ ID NO: 68, in which the asparagine at position N18 is substituted with glutamine. In some examples, the mutant soluble ActRIIB-ECD polypeptide may comprise a sequence at least 95% identical to SEQ ID NO: 69, in which the asparagine at position N18 is substituted with glutamine. In some examples, the mutant soluble ActRIIB-ECD polypeptide may comprise a sequence at least 95% identical to SEQ ID NO: 70, in which the asparagine at position N18 is substituted with glutamine. In some examples, the mutant soluble ActRIIB-ECD polypeptide may comprise a sequence at least 95% identical to SEQ ID NO: 71, in which the asparagine at position N18 is substituted with glutamine. In some examples, the mutant soluble ActRIIB-ECD polypeptide may comprise a sequence at least 95% identical to SEQ ID NO: 72, in which the asparagine at position N18 is substituted with glutamine. In some examples, the mutant soluble ActRIIB-ECD polypeptide may comprise a sequence at least 95% identical to SEQ ID NO: 73, in which the asparagine at position N18 is substituted with glutamine. In some examples, the mutant soluble ActRIIB-ECD polypeptide may comprise a sequence at least 95% identical to SEQ ID NO: 74, in which the asparagine at position N18 is substituted with glutamine. In some examples, the mutant soluble ActRIIB-ECD polypeptide may comprise a sequence at least 95% identical to SEQ ID NO: 75, in which the asparagine at position N18 is substituted with glutamine. In some examples, the mutant soluble ActRIIB-ECD polypeptide may comprise a sequence at least 95% identical to SEQ ID NO: 76, in which the asparagine at position N18 is substituted with another amino acid. In some examples, the mutant soluble ActRIIB-ECD polypeptide may comprise a sequence at least 95% identical to SEQ ID NO: 77, in which the asparagine at position N18 is substituted with glutamine. In some examples, the mutant soluble ActRIIB-ECD polypeptide may comprise a sequence at least 95% identical to SEQ ID NO: 78, in which the asparagine at position N18 is substituted with glutamine. In some examples, the mutant soluble ActRIIB-ECD polypeptide may comprise a sequence at least 95% identical to SEQ ID NO: 79, in which the asparagine at position N18 is substituted with glutamine. In some examples, the mutant soluble ActRIIB-ECD polypeptide may comprise a sequence at least 95% identical to SEQ ID NO: 80, in which the asparagine at position N18 is substituted with glutamine. In some examples, the mutant soluble ActRIIB-ECD polypeptide may comprise a sequence at least 95% identical to SEQ ID NO: 81, in which the asparagine at position N18 is substituted with glutamine. In some examples, the mutant soluble ActRIIB-ECD polypeptide may comprise a sequence at least 95% identical to SEQ ID NO: 82, in which the asparagine at position N18 is substituted with glutamine. In some examples, the mutant soluble ActRIIB-ECD polypeptide may comprise a sequence at least 95% identical to SEQ ID NO: 83, in which the asparagine at position N18 is substituted with glutamine. In some examples, the mutant soluble ActRIIB-ECD polypeptide may comprise a sequence at least 95% identical to SEQ ID NO: 84, in which the asparagine at position N18 is substituted with glutamine. In some examples, the mutant soluble ActRIIB-ECD polypeptide may comprise a sequence at least 95% identical to SEQ ID NO: 85, in which the asparagine at position N18 is substituted with another amino acid. In some examples, the mutant soluble ActRIIB-ECD polypeptide may comprise a sequence at least 95% identical to SEQ ID NO: 86, in which the asparagine at position N18 is substituted with glutamine. In some examples, the mutant soluble ActRIIB-ECD polypeptide may comprise a sequence at least 95% identical to SEQ ID NO: 87, in which the asparagine at position N18 is substituted with another amino acid. In some examples, the mutant soluble ActRIIB-ECD polypeptide may comprise a sequence at least 95% identical to SEQ ID NO: 88, in which the asparagine at position N18 is substituted with glutamine. In some examples, the mutant soluble ActRIIB-ECD polypeptide may comprise a sequence at least 95% identical to SEQ ID NO: 89, in which the asparagine at position N18 is substituted with glutamine. In some examples, the mutant soluble ActRIIB-ECD polypeptide may comprise a sequence at least 95% identical to SEQ ID NO: 90, in which the asparagine at position N18 is substituted with glutamine. In some examples, the mutant soluble ActRIIB-ECD polypeptide may comprise a sequence at least 95% identical to SEQ ID NO: 91, in which the asparagine at position N18 is substituted with glutamine. In some examples, the mutant soluble ActRIIB-ECD polypeptide may comprise a sequence at least 95% identical to SEQ ID NO: 92, in which the asparagine at position N18 is substituted with glutamine. In some examples, the mutant soluble ActRIIB-ECD polypeptide may comprise a sequence at least 95% identical to SEQ ID NO: 93, in which the asparagine at position N18 is substituted with glutamine. In some examples, the mutant soluble ActRIIB-ECD polypeptide may comprise a sequence at least 95% identical to SEQ ID NO: 94, in which the asparagine at position N18 is substituted with glutamine. In some examples, the mutant soluble ActRIIB-ECD polypeptide may comprise a sequence at least 95% identical to SEQ ID NO: 95, in which the asparagine at position N18 is substituted with glutamine. In some examples, the mutant soluble ActRIIB-ECD polypeptide may comprise a sequence at least 95% identical to SEQ ID NO: 96, in which the asparagine at position N18 is substituted with glutamine. In some examples, the mutant soluble ActRIIB-ECD polypeptide may comprise a sequence at least 95% identical to SEQ ID NO: 97, in which the asparagine at position N18 is substituted with glutamine. In some examples, the mutant soluble ActRIIB-ECD polypeptide may comprise a sequence at least 95% identical to SEQ ID NO: 98, in which the asparagine at position N18 is substituted with glutamine. In some examples, the mutant soluble ActRIIB-ECD polypeptide may comprise a sequence at least 95% identical to SEQ ID NO: 99, in which the asparagine at position N18 is substituted with glutamine. In some examples, the mutant soluble ActRIIB-ECD polypeptide may comprise a sequence at least 95% identical to SEQ ID NO: 100, in which the asparagine at position N18 is substituted with glutamine. In some examples, the mutant soluble ActRIIB-ECD polypeptide may comprise a sequence at least 95% identical to SEQ ID NO: 101, in which the asparagine at position N18 is substituted with glutamine. In some examples, the mutant soluble ActRIIB-ECD polypeptide may comprise a sequence at least 95% identical to SEQ ID NO: 102, in which the asparagine at position N18 is substituted with glutamine. In some examples, the mutant soluble ActRIIB-ECD polypeptide may comprise a sequence at least 95% identical to SEQ ID NO: 103, in which the asparagine at position N18 is substituted with glutamine. In some examples, the mutant soluble ActRIIB-ECD polypeptide may comprise a sequence at least 95% identical to SEQ ID NO: 104, in which the asparagine at position N18 is substituted with glutamine. In some examples, the mutant soluble ActRIIB-ECD polypeptide may comprise a sequence at least 95% identical to SEQ ID NO: 105, in which the asparagine at position N18 is substituted with glutamine. In some examples, the mutant soluble ActRIIB-ECD polypeptide may comprise a sequence at least 95% identical to SEQ ID NO: 106, in which the asparagine at position N18 is substituted with glutamine. In some examples, the mutant soluble ActRIIB-ECD polypeptide may comprise a sequence at least 95% identical to SEQ ID NO: 107, in which the asparagine at position N18 is substituted with glutamine. In some examples, the mutant soluble ActRIIB-ECD polypeptide may comprise a sequence at least 95% identical to SEQ ID NO: 108, in which the asparagine at position N18 is substituted with another amino acid. In some examples, the mutant soluble ActRIIB-ECD polypeptide may comprise a sequence at least 95% identical to SEQ ID NO: 109, in which the asparagine at position N18 is substituted with glutamine. In some examples, the mutant soluble ActRIIB-ECD polypeptide may comprise a sequence at least 95% identical to SEQ ID NO: 110, in which the asparagine at position N18 is substituted with glutamine. In some examples, the mutant soluble ActRIIB-ECD polypeptide may comprise a sequence at least 95% identical to SEQ ID NO: 111, in which the asparagine at position N18 is substituted with glutamine. In some examples, the mutant soluble ActRIIB-ECD polypeptide may comprise a sequence at least 95% identical to SEQ ID NO: 112, in which the asparagine at position N18 is substituted with glutamine. In some examples, the mutant soluble ActRIIB-ECD polypeptide may comprise a sequence at least 95% identical to SEQ ID NO: 113, in which the asparagine at position N18 is substituted with glutamine. In some examples, the mutant soluble ActRIIB-ECD polypeptide may comprise a sequence at least 95% identical to SEQ ID NO: 114, in which the asparagine at position N18 is substituted with glutamine. In some examples, the mutant soluble ActRIIB-ECD polypeptide may comprise a sequence at least 95% identical to SEQ ID NO: 115, in which the asparagine at position N18 is substituted with glutamine. In some examples, the mutant soluble ActRIIB-ECD polypeptide may comprise a sequence at least 95% identical to SEQ ID NO: 116, in which the asparagine at position N18 is substituted with glutamine. In some examples, the mutant soluble ActRIIB-ECD polypeptide may comprise a sequence at least 95% identical to SEQ ID NO: 117, in which the asparagine at position N18 is substituted with glutamine.

[0165] In some examples, the mutant soluble ActRIIB-ECD may comprise a sequence of any one of SEQ ID NOs: 3-37 and 51-117, in which the asparagine at position N18 is substituted with glutamine. For example, the mutant soluble ActRIIB-ECD may comprise a sequence of any one of SEQ ID NOs: 120-221. In one example, the mutant soluble ActRIIB-ECD may comprise a sequence of SEQ ID NO: 120. In another example, the mutant soluble ActRIIB-ECD may comprise a sequence of SEQ ID NO: 121. In another example, the mutant soluble ActRIIB-ECD may comprise a sequence of SEQ ID NO: 122. In another example, the mutant soluble ActRIIB-ECD may comprise a sequence of SEQ ID NO: 123. In another example, the mutant soluble ActRIIB-ECD may comprise a sequence of SEQ ID NO: 124. In another example, the mutant soluble ActRIIB-ECD may comprise a sequence of SEQ ID NO: 125. In another example, the mutant soluble ActRIIB-ECD may comprise a sequence of SEQ ID NO: 126. In another example, the mutant soluble ActRIIB-ECD may comprise a sequence of SEQ ID NO: 127. In another example, the mutant soluble ActRIIB-ECD may comprise a sequence of SEQ ID NO: 128. In another example, the mutant soluble ActRIIB-ECD may comprise a sequence of SEQ ID NO: 129. In another example, the mutant soluble ActRIIB-ECD may comprise a sequence of SEQ ID NO: 130. In another example, the mutant soluble ActRIIB-ECD may comprise a sequence of SEQ ID NO: 131. In another example, the mutant soluble ActRIIB-ECD may comprise a sequence of SEQ ID NO: 132. In another example, the mutant soluble ActRIIB-ECD may comprise a sequence of SEQ ID NO: 133. In another example, the mutant soluble ActRIIB-ECD may comprise a sequence of SEQ ID NO: 134. In another example, the mutant soluble ActRIIB-ECD may comprise a sequence of SEQ ID NO: 135. In another example, the mutant soluble ActRIIB-ECD may comprise a sequence of SEQ ID NO: 136. In another example, the mutant soluble ActRIIB-ECD may comprise a sequence of SEQ ID NO: 137. In another example, the mutant soluble ActRIIB-ECD may comprise a sequence of SEQ ID NO: 138. In another example, the mutant soluble ActRIIB-ECD may comprise a sequence of SEQ ID NO: 139. In another example, the mutant soluble ActRIIB-ECD may comprise a sequence of SEQ ID NO: 140. In another example, the mutant soluble ActRIIB-ECD may comprise a sequence of SEQ ID NO: 141. In another example, the mutant soluble ActRIIB-ECD may comprise a sequence of SEQ ID NO: 142. In another example, the mutant soluble ActRIIB-ECD may comprise a sequence of SEQ ID NO: 143. In another example, the mutant soluble ActRIIB-ECD may comprise a sequence of SEQ ID NO: 144. In another example, the mutant soluble ActRIIB-ECD may comprise a sequence of SEQ ID NO: 145. In another example, the mutant soluble ActRIIB-ECD may comprise a sequence of SEQ ID NO: 146. In another example, the mutant soluble ActRIIB-ECD may comprise a sequence of SEQ ID NO: 147. In another example, the mutant soluble ActRIIB-ECD may comprise a sequence of SEQ ID NO: 148. In another example, the mutant soluble ActRIIB-ECD may comprise a sequence of SEQ ID NO: 149. In another example, the mutant soluble ActRIIB-ECD may comprise a sequence of SEQ ID NO: 150. In another example, the mutant soluble ActRIIB-ECD may comprise a sequence of SEQ ID NO: 151. In another example, the mutant soluble ActRIIB-ECD may comprise a sequence of SEQ ID NO: 152. In another example, the mutant soluble ActRIIB-ECD may comprise a sequence of SEQ ID NO: 153. In another example, the mutant soluble ActRIIB-ECD may comprise a sequence of SEQ ID NO: 154. In another example, the mutant soluble ActRIIB-ECD may comprise a sequence of SEQ ID NO: 155. In another example, the mutant soluble ActRIIB-ECD may comprise a sequence of SEQ ID NO: 156. In another example, the mutant soluble ActRIIB-ECD may comprise a sequence of SEQ ID NO: 157. In another example, the mutant soluble ActRIIB-ECD may comprise a sequence of SEQ ID NO: 158. In another example, the mutant soluble ActRIIB-ECD may comprise a sequence of SEQ ID NO: 159. In another example, the mutant soluble ActRIIB-ECD may comprise a sequence of SEQ ID NO: 160. In another example, the mutant soluble ActRIIB-ECD may comprise a sequence of SEQ ID NO: 161. In another example, the mutant soluble ActRIIB-ECD may comprise a sequence of SEQ ID NO: 162. In another example, the mutant soluble ActRIIB-ECD may comprise a sequence of SEQ ID NO: 163. In another example, the mutant soluble ActRIIB-ECD may comprise a sequence of SEQ ID NO: 164. In another example, the mutant soluble ActRIIB-ECD may comprise a sequence of SEQ ID NO: 165. In another example, the mutant soluble ActRIIB-ECD may comprise a sequence of SEQ ID NO: 166. In another example, the mutant soluble ActRIIB-ECD may comprise a sequence of SEQ ID NO: 167. In another example, the mutant soluble ActRIIB-ECD may comprise a sequence of SEQ ID NO: 168. In another example, the mutant soluble ActRIIB-ECD may comprise a sequence of SEQ ID NO: 169. In another example, the mutant soluble ActRIIB-ECD may comprise a sequence of SEQ ID NO: 170. In another example, the mutant soluble ActRIIB-ECD may comprise a sequence of SEQ ID NO: 171. In another example, the mutant soluble ActRIIB-ECD may comprise a sequence of SEQ ID NO: 172. In another example, the mutant soluble ActRIIB-ECD may comprise a sequence of SEQ ID NO: 173. In another example, the mutant soluble ActRIIB-ECD may comprise a sequence of SEQ ID NO: 174. In another example, the mutant soluble ActRIIB-ECD may comprise a sequence of SEQ ID NO: 175. In another example, the mutant soluble ActRIIB-ECD may comprise a sequence of SEQ ID NO: 176. In another example, the mutant soluble ActRIIB-ECD may comprise a sequence of SEQ ID NO: 177. In another example, the mutant soluble ActRIIB-ECD may comprise a sequence of SEQ ID NO: 178. In another example, the mutant soluble ActRIIB-ECD may comprise a sequence of SEQ ID NO: 179. In another example, the mutant soluble ActRIIB-ECD may comprise a sequence of SEQ ID NO: 180. In another example, the mutant soluble ActRIIB-ECD may comprise a sequence of SEQ ID NO: 181. In another example, the mutant soluble ActRIIB-ECD may comprise a sequence of SEQ ID NO: 182. In another example, the mutant soluble ActRIIB-ECD may comprise a sequence of SEQ ID NO: 183. In another example, the mutant soluble ActRIIB-ECD may comprise a sequence of SEQ ID NO: 184. In another example, the mutant soluble ActRIIB-ECD may comprise a sequence of SEQ ID NO: 185. In another example, the mutant soluble ActRIIB-ECD may comprise a sequence of SEQ ID NO: 186. In another example, the mutant soluble ActRIIB-ECD may comprise a sequence of SEQ ID NO: 187. In another example, the mutant soluble ActRIIB-ECD may comprise a sequence of SEQ ID NO: 188. In another example, the mutant soluble ActRIIB-ECD may comprise a sequence of SEQ ID NO: 189. In another example, the mutant soluble ActRIIB-ECD may comprise a sequence of SEQ ID NO: 190. In another example, the mutant soluble ActRIIB-ECD may comprise a sequence of SEQ ID NO: 191. In another example, the mutant soluble ActRIIB-ECD may comprise a sequence of SEQ ID NO: 192. In another example, the mutant soluble ActRIIB-ECD may comprise a sequence of SEQ ID NO: 193. In another example, the mutant soluble ActRIIB-ECD may comprise a sequence of SEQ ID NO: 194. In another example, the mutant soluble ActRIIB-ECD may comprise a sequence of SEQ ID NO: 195. In another example, the mutant soluble ActRIIB-ECD may comprise a sequence of SEQ ID NO: 196. In another example, the mutant soluble ActRIIB-ECD may comprise a sequence of SEQ ID NO: 197. In another example, the mutant soluble ActRIIB-ECD may comprise a sequence of SEQ ID NO: 198. In another example, the mutant soluble ActRIIB-ECD may comprise a sequence of SEQ ID NO: 199. In another example, the mutant soluble ActRIIB-ECD may comprise a sequence of SEQ ID NO: 200. In another example, the mutant soluble ActRIIB-ECD may comprise a sequence of SEQ ID NO: 201. In another example, the mutant soluble ActRIIB-ECD may comprise a sequence of SEQ ID NO: 202. In another example, the mutant soluble ActRIIB-ECD may comprise a sequence of SEQ ID NO: 203. In another example, the mutant soluble ActRIIB-ECD may comprise a sequence of SEQ ID NO: 204. In another example, the mutant soluble ActRIIB-ECD may comprise a sequence of SEQ ID NO: 205. In another example, the mutant soluble ActRIIB-ECD may comprise a sequence of SEQ ID NO: 206. In another example, the mutant soluble ActRIIB-ECD may comprise a sequence of SEQ ID NO: 207. In another example, the mutant soluble ActRIIB-ECD may comprise a sequence of SEQ ID NO: 208. In another example, the mutant soluble ActRIIB-ECD may comprise a sequence of SEQ ID NO: 209. In another example, the mutant soluble ActRIIB-ECD may comprise a sequence of SEQ ID NO: 210. In another example, the mutant soluble ActRIIB-ECD may comprise a sequence of SEQ ID NO: 211. In another example, the mutant soluble ActRIIB-ECD may comprise a sequence of SEQ ID NO: 212. In another example, the mutant soluble ActRIIB-ECD may comprise a sequence of SEQ ID NO: 213. In another example, the mutant soluble ActRIIB-ECD may comprise a sequence of SEQ ID NO: 214. In another example, the mutant soluble ActRIIB-ECD may comprise a sequence of SEQ ID NO: 215. In another example, the mutant soluble ActRIIB-ECD may comprise a sequence of SEQ ID NO: 216. In another example, the mutant soluble ActRIIB-ECD may comprise a sequence of SEQ ID NO: 217. In another example, the mutant soluble ActRIIB-ECD may comprise a sequence of SEQ ID NO: 218. In another example, the mutant soluble ActRIIB-ECD may comprise a sequence of SEQ ID NO: 219. In another example, the mutant soluble ActRIIB-ECD may comprise a sequence of SEQ ID NO: 220. In another example, the mutant soluble ActRIIB-ECD may comprise a sequence of SEQ ID NO: 221. In some embodiments, the isolated protein may comprise a mutant ActRIIB-ECD, which may comprise a sequence selected from the group consisting of SEQ ID NOs: 120-221, and the ActRIIB-ECD may further comprise from 1 to 6 additional amino acids on the N-terminus of the sequence corresponding to amino acids 1-6 of SEQ ID NO: 46.

[0166] In some examples, the mutant soluble ActRIIB-ECD may consist of a sequence of any one of SEQ ID NOs: 3-37 and 51-117, in which the asparagine at position N18 is substituted with glutamine. For example, the mutant soluble ActRIIB-ECD may consist of a sequence of any one of SEQ ID NOs: 120-221. In one example, the mutant soluble ActRIIB-ECD may consist of a sequence of SEQ ID NO: 120. In another example, the mutant soluble ActRIIB-ECD may consist of a sequence of SEQ ID NO: 121. In another example, the mutant soluble ActRIIB-ECD may consist of a sequence of SEQ ID NO: 122. In another example, the mutant soluble ActRIIB-ECD may consist of a sequence of SEQ ID NO: 123. In another example, the mutant soluble ActRIIB-ECD may consist of a sequence of SEQ ID NO: 124. In another example, the mutant soluble ActRIIB-ECD may consist of a sequence of SEQ ID NO: 125. In another example, the mutant soluble ActRIIB-ECD may consist of a sequence of SEQ ID NO: 126. In another example, the mutant soluble ActRIIB-ECD may consist of a sequence of SEQ ID NO: 127. In another example, the mutant soluble ActRIIB-ECD may consist of a sequence of SEQ ID NO: 128. In another example, the mutant soluble ActRIIB-ECD may consist of a sequence of SEQ ID NO: 129. In another example, the mutant soluble ActRIIB-ECD may consist of a sequence of SEQ ID NO: 130. In another example, the mutant soluble ActRIIB-ECD may consist of a sequence of SEQ ID NO: 131. In another example, the mutant soluble ActRIIB-ECD may consist of a sequence of SEQ ID NO: 132. In another example, the mutant soluble ActRIIB-ECD may consist of a sequence of SEQ ID NO: 133. In another example, the mutant soluble ActRIIB-ECD may consist of a sequence of SEQ ID NO: 134. In another example, the mutant soluble ActRIIB-ECD may consist of a sequence of SEQ ID NO: 135. In another example, the mutant soluble ActRIIB-ECD may consist of a sequence of SEQ ID NO: 136. In another example, the mutant soluble ActRIIB-ECD may consist of a sequence of SEQ ID NO: 137. In another example, the mutant soluble ActRIIB-ECD may consist of a sequence of SEQ ID NO: 138. In another example, the mutant soluble ActRIIB-ECD may consist of a sequence of SEQ ID NO: 139. In another example, the mutant soluble ActRIIB-ECD may consist of a sequence of SEQ ID NO: 140. In another example, the mutant soluble ActRIIB-ECD may consist of a sequence of SEQ ID NO: 141. In another example, the mutant soluble ActRIIB-ECD may consist of a sequence of SEQ ID NO: 142. In another example, the mutant soluble ActRIIB-ECD may consist of a sequence of SEQ ID NO: 143. In another example, the mutant soluble ActRIIB-ECD may consist of a sequence of SEQ ID NO: 144. In another example, the mutant soluble ActRIIB-ECD may consist of a sequence of SEQ ID NO: 145. In another example, the mutant soluble ActRIIB-ECD may consist of a sequence of SEQ ID NO: 146. In another example, the mutant soluble ActRIIB-ECD may consist of a sequence of SEQ ID NO: 147. In another example, the mutant soluble ActRIIB-ECD may consist of a sequence of SEQ ID NO: 148. In another example, the mutant soluble ActRIIB-ECD may consist of a sequence of SEQ ID NO: 149. In another example, the mutant soluble ActRIIB-ECD may consist of a sequence of SEQ ID NO: 150. In another example, the mutant soluble ActRIIB-ECD may consist of a sequence of SEQ ID NO: 151. In another example, the mutant soluble ActRIIB-ECD may consist of a sequence of SEQ ID NO: 152. In another example, the mutant soluble ActRIIB-ECD may consist of a sequence of SEQ ID NO: 153. In another example, the mutant soluble ActRIIB-ECD may consist of a sequence of SEQ ID NO: 154. In another example, the mutant soluble ActRIIB-ECD may consist of a sequence of SEQ ID NO: 155. In another example, the mutant soluble ActRIIB-ECD may consist of a sequence of SEQ ID NO: 156. In another example, the mutant soluble ActRIIB-ECD may consist of a sequence of SEQ ID NO: 157. In another example, the mutant soluble ActRIIB-ECD may consist of a sequence of SEQ ID NO: 158. In another example, the mutant soluble ActRIIB-ECD may consist of a sequence of SEQ ID NO: 159. In another example, the mutant soluble ActRIIB-ECD may consist of a sequence of SEQ ID NO: 160. In another example, the mutant soluble ActRIIB-ECD may consist of a sequence of SEQ ID NO: 161. In another example, the mutant soluble ActRIIB-ECD may consist of a sequence of SEQ ID NO: 162. In another example, the mutant soluble ActRIIB-ECD may consist of a sequence of SEQ ID NO: 163. In another example, the mutant soluble ActRIIB-ECD may consist of a sequence of SEQ ID NO: 164. In another example, the mutant soluble ActRIIB-ECD may consist of a sequence of SEQ ID NO: 165. In another example, the mutant soluble ActRIIB-ECD may consist of a sequence of SEQ ID NO: 166. In another example, the mutant soluble ActRIIB-ECD may consist of a sequence of SEQ ID NO: 167. In another example, the mutant soluble ActRIIB-ECD may consist of a sequence of SEQ ID NO: 168. In another example, the mutant soluble ActRIIB-ECD may consist of a sequence of SEQ ID NO: 169. In another example, the mutant soluble ActRIIB-ECD may consist of a sequence of SEQ ID NO: 170. In another example, the mutant soluble ActRIIB-ECD may consist of a sequence of SEQ ID NO: 171. In another example, the mutant soluble ActRIIB-ECD may consist of a sequence of SEQ ID NO: 172. In another example, the mutant soluble ActRIIB-ECD may consist of a sequence of SEQ ID NO: 173. In another example, the mutant soluble ActRIIB-ECD may consist of a sequence of SEQ ID NO: 174. In another example, the mutant soluble ActRIIB-ECD may consist of a sequence of SEQ ID NO: 175. In another example, the mutant soluble ActRIIB-ECD may consist of a sequence of SEQ ID NO: 176. In another example, the mutant soluble ActRIIB-ECD may consist of a sequence of SEQ ID NO: 177. In another example, the mutant soluble ActRIIB-ECD may consist of a sequence of SEQ ID NO: 178. In another example, the mutant soluble ActRIIB-ECD may consist of a sequence of SEQ ID NO: 179. In another example, the mutant soluble ActRIIB-ECD may consist of a sequence of SEQ ID NO: 180. In another example, the mutant soluble ActRIIB-ECD may consist of a sequence of SEQ ID NO: 181. In another example, the mutant soluble ActRIIB-ECD may consist of a sequence of SEQ ID NO: 182. In another example, the mutant soluble ActRIIB-ECD may consist of a sequence of SEQ ID NO: 183. In another example, the mutant soluble ActRIIB-ECD may consist of a sequence of SEQ ID NO: 184. In another example, the mutant soluble ActRIIB-ECD may consist of a sequence of SEQ ID NO: 185. In another example, the mutant soluble ActRIIB-ECD may consist of a sequence of SEQ ID NO: 186. In another example, the mutant soluble ActRIIB-ECD may consist of a sequence of SEQ ID NO: 187. In another example, the mutant soluble ActRIIB-ECD may consist of a sequence of SEQ ID NO: 188. In another example, the mutant soluble ActRIIB-ECD may consist of a sequence of SEQ ID NO: 189. In another example, the mutant soluble ActRIIB-ECD may consist of a sequence of SEQ ID NO: 190. In another example, the mutant soluble ActRIIB-ECD may consist of a sequence of SEQ ID NO: 191. In another example, the mutant soluble ActRIIB-ECD may consist of a sequence of SEQ ID NO: 192. In another example, the mutant soluble ActRIIB-ECD may consist of a sequence of SEQ ID NO: 193. In another example, the mutant soluble ActRIIB-ECD may consist of a sequence of SEQ ID NO: 194. In another example, the mutant soluble ActRIIB-ECD may consist of a sequence of SEQ ID NO: 195. In another example, the mutant soluble ActRIIB-ECD may consist of a sequence of SEQ ID NO: 196. In another example, the mutant soluble ActRIIB-ECD may consist of a sequence of SEQ ID NO: 197. In another example, the mutant soluble ActRIIB-ECD may consist of a sequence of SEQ ID NO: 198. In another example, the mutant soluble ActRIIB-ECD may consist of a sequence of SEQ ID NO: 199. In another example, the mutant soluble ActRIIB-ECD may consist of a sequence of SEQ ID NO: 200. In another example, the mutant soluble ActRIIB-ECD may consist of a sequence of SEQ ID NO: 201. In another example, the mutant soluble ActRIIB-ECD may consist of a sequence of SEQ ID NO: 202. In another example, the mutant soluble ActRIIB-ECD may consist of a sequence of SEQ ID NO: 203. In another example, the mutant soluble ActRIIB-ECD may consist of a sequence of SEQ ID NO: 204. In another example, the mutant soluble ActRIIB-ECD may consist of a sequence of SEQ ID NO: 205. In another example, the mutant soluble ActRIIB-ECD may consist of a sequence of SEQ ID NO: 206. In another example, the mutant soluble ActRIIB-ECD may consist of a sequence of SEQ ID NO: 207. In another example, the mutant soluble ActRIIB-ECD may consist of a sequence of SEQ ID NO: 208. In another example, the mutant soluble ActRIIB-ECD may consist of a sequence of SEQ ID NO: 209. In another example, the mutant soluble ActRIIB-ECD may consist of a sequence of SEQ ID NO: 210. In another example, the mutant soluble ActRIIB-ECD may consist of a sequence of SEQ ID NO: 211. In another example, the mutant soluble ActRIIB-ECD may consist of a sequence of SEQ ID NO: 212. In another example, the mutant soluble ActRIIB-ECD may consist of a sequence of SEQ ID NO: 213. In another example, the mutant soluble ActRIIB-ECD may consist of a sequence of SEQ ID NO: 214. In another example, the mutant soluble ActRIIB-ECD may consist of a sequence of SEQ ID NO: 215. In another example, the mutant soluble ActRIIB-ECD may consist of a sequence of SEQ ID NO: 216. In another example, the mutant soluble ActRIIB-ECD may consist of a sequence of SEQ ID NO: 217. In another example, the mutant soluble ActRIIB-ECD may consist of a sequence of SEQ ID NO: 218. In another example, the mutant soluble ActRIIB-ECD may consist of a sequence of SEQ ID NO: 219. In another example, the mutant soluble ActRIIB-ECD may consist of a sequence of SEQ ID NO: 220. In another example, the mutant soluble ActRIIB-ECD may comprise a sequence of SEQ ID NO: 221.

[0167] In some embodiments, the mutant soluble ActRIIB-ECD may comprise a sequence of any one of SEQ ID NOs: 3-37 and 51-117, in which the serine at position S20 is substituted with another amino acid that is not serine(S) or threonine (T). In one example, the mutant soluble ActRIIB-ECD may comprise a sequence of any one of SEQ ID NOs: 3-37 and 51-117, in which the serine at position S20 is substituted with an alanine. In another example, the mutant soluble ActRIIB-ECD may comprise a sequence of any one of SEQ ID NOs: 3-37 and 51-117, in which the serine at position S20 is substituted with an arginine. In another example, the mutant soluble ActRIIB-ECD may comprise a sequence of any one of SEQ ID NOs: 3-37 and 51-117, in which the serine at position S20 is substituted with an asparagine. In another example, the mutant soluble ActRIIB-ECD may comprise a sequence of any one of SEQ ID NOs: 3-37 and 51-117, in which the serine at position S20 is substituted with an aspartate. In another example, the mutant soluble ActRIIB-ECD may comprise a sequence of any one of SEQ ID NOs: 3-37 and 51-117, in which the serine at position S20 is substituted with a cysteine. In another example, the mutant soluble ActRIIB-ECD may comprise a sequence of any one of SEQ ID NOs: 3-37 and 51-117, in which the serine at position S20 is substituted with a glutamine. In another example, the mutant soluble ActRIIB-ECD may comprise a sequence of any one of SEQ ID NOs: 3-37 and 51-117, in which the serine at position S20 is substituted with a glutamate. In another example, the mutant soluble ActRIIB-ECD may comprise a sequence of any one of SEQ ID NOs: 3-37 and 51-117, in which the serine at position S20 is substituted with a glycine. In another example, the mutant soluble ActRIIB-ECD may comprise a sequence of any one of SEQ ID NOs: 3-37 and 51-117, in which the serine at position S20 is substituted with a histidine. In another example, the mutant soluble ActRIIB-ECD may comprise a sequence of any one of SEQ ID NOs: 3-37 and 51-117, in which the serine at position S20 is substituted with an isoleucine. In another example, the mutant soluble ActRIIB-ECD may comprise a sequence of any one of SEQ ID NOs: 3-37 and 51-117, in which the serine at position S20 is substituted with a leucine. In another example, the mutant soluble ActRIIB-ECD may comprise a sequence of any one of SEQ ID NOs: 3-37 and 51-117, in which the serine at position S20 is substituted with a lysine. In another example, the mutant soluble ActRIIB-ECD may comprise a sequence of any one of SEQ ID NOs: 3-37 and 51-117, in which the serine at position S20 is substituted with a methionine. In another example, the mutant soluble ActRIIB-ECD may comprise a sequence of any one of SEQ ID NOs: 3-37 and 51-117, in which the serine at position S20 is substituted with a phenylalanine. In another example, the mutant soluble ActRIIB-ECD may comprise a sequence of any one of SEQ ID NOs: 3-37 and 51-117, in which the serine at position S20 is substituted with a proline. In another example, the mutant soluble ActRIIB-ECD may comprise a sequence of any one of SEQ ID NOs: 3-37 and 51-117, in which the serine at position S20 is substituted with a tryptophan. In another example, the mutant soluble ActRIIB-ECD may comprise a sequence of any one of SEQ ID NOs: 3-37 and 51-117, in which the serine at position S20 is substituted with a tyrosine. In another example, the mutant soluble ActRIIB-ECD may comprise a sequence of any one of SEQ ID NOs: 3-37 and 51-117, in which the serine at position S20 is substituted with a valine.

[0168] In some embodiments, the one more additional mutations may be introduced so that the mutant soluble ActRIIB-ECD demonstrates decreased affinity for activin while retaining binding to Growth Differentiation Factor 11 (GDF11). Such mutants may exhibit desired effects on muscle but reduced effects on other tissues. In some examples, the additional mutation in the mutant soluble ActRIIB-ECD may be a substitution of the leucine corresponding to position L55 of SEQ ID NO: 1 with an acidic amino acid (e.g., aspartate (D) or glutamate (E)). The L55D and L55E variants may show substantial loss of activin binding while retaining almost wild type inhibition of GDF-11. Methods of measuring the effects of L55D and L55E on the binding of the mutant soluble ActRIIB-ECD include those described in WO2008097541, which is incorporated by reference herein in its entirety.

[0169] In some examples, the additional mutation in the mutant soluble ActRIIB-ECD may be a substitution of the leucine corresponding to position L55 of SEQ ID NO: 1 with an aspartate (D). In some examples, the mutant soluble ActRIIB-ECD may comprise a sequence at least 80% (e.g., at least 85%, 90%, 95%, 96%, 97%, or 98%) identical to SEQ ID NO: 327, in which the asparagine at position N18 is substituted with another amino acid. For example, the mutant soluble ActRIIB-ECD may comprise a sequence at least 95% identical to SEQ ID NO: 327, in which the asparagine at position N18 is substituted with another amino acid. In one example, the mutant soluble ActRIIB-ECD may comprise a sequence of SEQ ID NO: 328. In one example, the mutant soluble ActRIIB-ECD may consist of a sequence of SEQ ID NO: 328. In some examples, the mutant soluble ActRIIB-ECD may comprise a sequence at least 80% (e.g., at least 85%, 90%, 95%, 96%, 97%, or 98%) identical to SEQ ID NO: 327, in which the asparagine at position N18 is substituted with glutamine. For example, the mutant soluble ActRIIB-ECD may comprise a sequence at least 95% identical to SEQ ID NO: 327, in which the asparagine at position N18 is substituted with glutamine. In one example, the mutant soluble ActRIIB-ECD may comprise a sequence of SEQ ID NO: 329. In one example, the mutant soluble ActRIIB-ECD may consist of a sequence of SEQ ID NO: 329. In some examples, the mutant soluble ActRIIB-ECD may comprise a sequence at least 80% (e.g., at least 85%, 90%, 95%, 96%, 97%, or 98%) identical to SEQ ID NO: 327, in which the serine at position S20 is substituted with another amino acid that is not serine(S) or threonine (T).

[0170] In some examples, the additional mutation in the mutant soluble ActRIIB-ECD may be a substitution of the leucine corresponding to position L55 of SEQ ID NO: 1 with a glutamate (E). In some examples, the mutant soluble ActRIIB-ECD may comprise a sequence at least 80% (e.g., at least 85%, 90%, 95%, 96%, 97%, or 98%) identical to SEQ ID NO: 330 in which the asparagine at position N18 is substituted with another amino acid. For example, the mutant soluble ActRIIB-ECD may comprise a sequence at least 95% identical to SEQ ID NO: 330, in which the asparagine at position N18 is substituted with another amino acid. In one example, the mutant soluble ActRIIB-ECD may comprise a sequence of SEQ ID NO: 331. In one example, the mutant soluble ActRIIB-ECD may consist of a sequence of SEQ ID NO: 331. In some examples, the mutant soluble ActRIIB-ECD may comprise a sequence at least 80% (e.g., at least 85%, 90%, 95%, 96%, 97%, or 98%) identical to SEQ ID NO: 330, in which the asparagine at position N18 is substituted with glutamine. For example, the mutant soluble ActRIIB-ECD may comprise a sequence at least 95% identical SEQ ID NO: 330, in which the asparagine at position N18 is substituted with glutamine. In one example, the mutant soluble ActRIIB-ECD may comprise a sequence of SEQ ID NO: 332. In one example, the mutant soluble ActRIIB-ECD may consist of a sequence of SEQ ID NO: 332. In some examples, the mutant soluble ActRIIB-ECD may comprise a sequence at least 80% (e.g., at least 85%, 90%, 95%, 96%, 97%, or 98%) identical to SEQ ID NO: 330 in which the serine at position S20 is substituted with another amino acid that is that is not serine(S) or threonine (T).

[0171] In some embodiments, the additional mutations may include mutations resulting from naturally polymorphism. In some examples, in the mutant soluble ActRIIB-ECD, the arginine (R) corresponding to position R40 of SEQ ID NO: 1 may be substituted with an alanine (A). The R40A mutant may show an altered ligand binding affinity. For example, the R40A mutation may cause decreased GDF-11 and/or activin A inhibition, which may be desired in certain applications. Methods of measuring the effects on ligand binding or inhibition include those described in WO2006012627, which is incorporated by reference herein in its entirety.

[0172] In some examples, the additional mutation in the mutant soluble ActRIIB-ECD may be a substitution of the arginine corresponding to position R40 of SEQ ID NO: 1 with an alanine (A). In some examples, the mutant soluble ActRIIB-ECD may comprise a sequence at least 80% (e.g., at least 85%, 90%, 95%, 96%, 97%, or 98%) identical to SEQ ID NO: 333, in which the asparagine at position N18 is substituted with another amino acid. For example, the mutant soluble ActRIIB-ECD may comprise a sequence at least 95% identical to SEQ ID NO: 333, in which the asparagine at position N18 is substituted with another amino acid. In one example, the mutant soluble ActRIIB-ECD may comprise a sequence of SEQ ID NO: 334. In one example, the mutant soluble ActRIIB-ECD may consist of a sequence of SEQ ID NO: 334. In some examples, the mutant soluble ActRIIB-ECD may comprise a sequence at least 80% (e.g., at least 85%, 90%, 95%, 96%, 97%, or 98%) identical to SEQ ID NO: 333, in which the asparagine at position N18 is substituted with glutamine. For example, the mutant soluble ActRIIB-ECD may comprise a sequence at least 95% identical to SEQ ID NO: 333, in which the asparagine at position N18 is substituted with glutamine. In one example, the mutant soluble ActRIIB-ECD may comprise a sequence of SEQ ID NO: 335. In one example, the mutant soluble ActRIIB-ECD may consist of a sequence of SEQ ID NO: 335. In some examples, the mutant soluble ActRIIB-ECD may comprise a sequence at least 80% (e.g., at least 85%, 90%, 95%, 96%, 97%, or 98%) identical to SEQ ID NO: 333, in which the serine at position S20 is substituted with another amino acid that is that is not serine(S) or threonine (T).

[0173] In some embodiments, the isolated protein may comprise a mutant ActRIIB-ECD, which may comprise a sequence selected from the group consisting of SEQ ID NOs: 333-335, wherein the ActRIIB-ECD may further comprise from 1 to 6 additional amino acids on the N-terminus of the sequence corresponding to amino acids 1-6 of SEQ ID NO: 46. In some examples, the mutant ActRIIB-ECD may comprise a sequence of SEQ ID NO: 1613, 1626, or 1639, in which N19 is substituted with another amino acid. For example, the mutant ActRIIB-ECD may comprise a sequence of SEQ ID NO: 1619, 1632, or 1645. In some examples, the mutant ActRIIB-ECD may comprise a sequence of SEQ ID NO: 1614, 1627, or 1640, in which N20 is substituted with another amino acid. For example, the mutant ActRIIB-ECD may comprise a sequence of SEQ ID NO: 1620, 1633, or 1646. In some examples, the mutant ActRIIB-ECD may comprise a sequence of SEQ ID NO: 1615, 1628, or 1641, in which N21 is substituted with another amino acid. For example, the mutant ActRIIB-ECD may comprise a sequence of SEQ ID NO: 1621, 1634, or 1647. In some examples, the mutant ActRIIB-ECD may comprise a sequence of SEQ ID NO: 1616, 1629, or 1642, in which N22 is substituted with another amino acid. For example, the mutant ActRIIB-ECD may comprise a sequence of SEQ ID NO: 1622, 1635, or 1648. In some examples, the mutant ActRIIB-ECD may comprise a sequence of SEQ ID NO: 1617, 1630, or 1643, in which N23 is substituted with another amino acid. For example, the mutant ActRIIB-ECD may comprise a sequence of SEQ ID NO: 1623, 1636, or 1649. In some examples, the mutant ActRIIB-ECD may comprise a sequence of SEQ ID NO: 1618, 1631, or 1644, in which N24 is substituted with another amino acid. For example, the mutant ActRIIB-ECD may comprise a sequence of SEQ ID NO: 1624, 1637, or 1650.

[0174] In some examples, the mutant ActRIIB-ECD may comprise a sequence of SEQ ID NO: 1613, 1626, or 1639, in which S21 is substituted with another amino acid other than serine(S) or threonine (T). In some examples, the mutant ActRIIB-ECD may comprise a sequence of SEQ ID NO: 1614, 1627, or 1640, in which S22 is substituted with another amino acid other than serine(S) or threonine (T). In some examples, the mutant ActRIIB-ECD may comprise a sequence of SEQ ID NO: 1615, 1628, or 1641, in which S23 is substituted with another amino acid other than serine(S) or threonine (T). In some examples, the mutant ActRIIB-ECD may comprise a sequence of SEQ ID NO: 1616, 1629, or 1642, in which S24 is substituted with another amino acid other than serine(S) or threonine (T). In some examples, the mutant ActRIIB-ECD may comprise a sequence of SEQ ID NO: 1617, 1630, or 1643, in which S25 is substituted with another amino acid other than serine(S) or threonine (T). In some examples, the mutant ActRIIB-ECD may comprise a sequence of SEQ ID NO: 1618, 1631, or 1644, in which S26 is substituted with another amino acid other than serine(S) or threonine (T).

[0175] In some embodiments, the isolated protein may comprise a mutant of ActRIIB-ECD that has been developed, tested, and/or used as a therapeutic agent. For example, the isolated protein may comprise a mutant of the ActRIIB-ECD polypeptide in luspatercept (SEQ ID NO: 1658). In some embodiments, the isolated protein may comprise a mutant soluble ActRIIB-ECD comprising a mutation that removes the glycosylation site at N18 of SEQ ID NO: 1658. In some embodiments, the isolated protein may comprise the sequence of SEQ ID NO: 1664.

[0176] In some embodiments, the mutant soluble ActRIIB-ECD may comprise a mutation at the position corresponding to position N18 of SEQ ID NO: 1658 (i.e., the asparagine at position N18 is substituted with another amino acid). For example, the mutant soluble ActRIIB-ECD may comprise a sequence of SEQ ID NO: 1659.

[0177] In some examples, the mutant soluble ActRIIB-ECD may comprise a N18Q mutation, i.e., in the mutant soluble ActRIIB-ECD, the asparagine at position N18 or a position corresponding to N18 is substituted with glutamine. For example, the mutant soluble ActRIIB-ECD may comprise a sequence of SEQ ID NO: 1660. In another example, the mutant soluble ActRIIB-ECD may consist of a sequence of SEQ ID NO: 1660.

[0178] In some examples, the mutant soluble ActRIIB-ECD polypeptide may comprise a sequence at least 80% (e.g., at least 85%, 90%, 95%, 96%, 97%, or 98%) identical to SEQ ID NO: 1659, in which the asparagine at position N18 is substituted with another amino acid. For example, the mutant soluble ActRIIB-ECD polypeptide may comprise a sequence at least 95% identical to SEQ ID NO: 1659, in which the asparagine at position N18 is substituted with another amino acid.

[0179] In some examples, the mutant soluble ActRIIB-ECD polypeptide may comprise a sequence at least 80% (e.g., at least 85%, 90%, 95%, 96%, 97%, or 98%) identical to SEQ ID NO: 1660, in which the asparagine at position N18 is substituted with glutamine. For example, the mutant soluble ActRIIB-ECD polypeptide may comprise a sequence at least 95% identical to SEQ ID NO: 1660, in which the asparagine at position N18 is substituted with glutamine.

[0180] In some embodiments, the mutant soluble ActRIIB-ECD may comprise a mutation at position corresponding to position S20 of SEQ ID NO: 1658 (i.e., the asparagine at position S20 is substituted with another amino acid other than serine(S) or threonine (T)). For example, the mutant soluble ActRIIB-ECD may comprise a sequence of SEQ ID NO: 1661.

[0181] In some examples, the mutant soluble ActRIIB-ECD polypeptide may comprise a sequence at least 80% (e.g., at least 85%, 90%, 95%, 96%, 97%, or 98%) identical to SEQ ID NO: 1661, in which the asparagine at position S20 is substituted with another amino acid than serine(S) or threonine (T). For example, the mutant soluble ActRIIB-ECD polypeptide may comprise a sequence at least 95% identical to SEQ ID NO: 1661, in which the asparagine at position S20 is substituted with another amino acid than serine(S) or threonine (T).

### Binding to Partners and Modifications

[0182] In some embodiments, the mutant soluble ActRIIA-ECD or ActRIIB-ECD polypeptides demonstrate increased binding of a binding partner compared to relative to an otherwise identical soluble ActRIIB-ECD that includes the N-linked glycosylation site corresponding to position N18 of SEQ ID NO: 1. In some examples, the binding partner may be myostatin. In some examples, the binding partner may be activin. The binding of the mutant soluble ActRIIA-ECD or ActRIIB-ECD with its binding partner may be measured by any method for determining protein-protein interactions, e.g., the method described in Example 3.

[0183] In some examples, the mutant soluble ActRIIA-ECD or ActRIIB-ECD polypeptides demonstrate at least 10%, 20%, 30%, 40%, 50%, 60%, 70%, 80%, or 90% higher level of binding to a binding partner relative to an otherwise identical soluble ActRIIA-ECD or ActRIIB-ECD that includes the N-linked glycosylation site corresponding to position N18 of SEQ ID NO: 1. In some examples, the mutant soluble ActRIIB-ECD polypeptides herein demonstrate at least 10%, 20%, 30%, 40%, 50%, 60%, 70%, 80%, or 90% higher level of binding to myostatin relative to an otherwise identical soluble ActRIIA-ECD or ActRIIB-ECD that includes the N-linked glycosylation site corresponding to position N18 of SEQ ID NO: 1. In some examples, the mutant soluble ActRIIA-ECD or ActRIIB-ECD polypeptides herein demonstrate at least 10%, 20%, 30%, 40%, 50%, 60%, 70%, 80%, or 90% higher level of binding to activin relative to an otherwise identical soluble ActRIIA-ECD or ActRIIB-ECD that includes the N-linked glycosylation site corresponding to position N18 of SEQ ID NO: 1. The binding level may refer to the binding affinity, which is the measurement of the strength of the binding interaction between two molecules. The binding level between the soluble ActRIIA-ECD or ActRIIB-ECD and its binding partner may be measured by enzyme-linked immunosorbent assays (ELISA), as shown in Example 3.

[0184] In some embodiments, the removal of the N-linked glycosylation site corresponding to position N18 of SEQ ID NO: 1 does not eliminate or affect glycosylation on other site. In some examples, the mutant soluble ActRIIA-ECD or ActRIIB-ECD polypeptide may be glycosylated at an asparagine residue corresponding to positions N41 of SEQ ID NO: 1. In some examples, the mutant soluble ActRIIA-ECD or ActRIIB-ECD polypeptide may be glycosylated at an asparagine residue corresponding to positions N41 of SEQ ID NO: 1.

[0185] In some embodiments, the mutant soluble ActRIIA-ECD or ActRIIB polypeptide may comprise a certain level of sialylation. For example, a sample of the mutant soluble ActRIIB polypeptide may comprise at least 5%, 10%, 20%, 30%, 40%, 50%, 60%, 70%, 80%, or 90% sialylated glycans. In some examples, a sample of the mutant soluble ActRIIA-ECD or ActRIIB polypeptide may comprise at least 40% sialylated glycans. In some embodiments, a sample of the mutant soluble ActRIIA-ECD or ActRIIB-ECD comprises at least 5%, 10%, 20%, 30%, 40%, 50%, 60%, 70%, 80%, or 90% sialylated glycans at the position corresponding to N41 of SEQ ID NO: 1. In some preferred embodiments, a sample of the mutant soluble ActRIIA-ECD or ActRIIB-ECD comprises at least 40%, 45%, 50%, 55%, 60%, 65%, 70%, 75%, 80%, 85%, 90% or more sialylated glycans at the position corresponding to N41 of SEQ ID NO: 1. In more preferred embodiments, a sample of the mutant soluble ActRIIA-ECD or ActRIIB-ECD comprises at least 60%, 65%, 70%, 75%, 80%, 85%, 90% or more sialylated glycans at the position corresponding to N41 of SEQ ID NO: 1. In especially preferred embodiments, a sample of the mutant soluble ActRIIA-ECD or ActRIIB-ECD comprises at least 70%, 75%, 80%, 85%, 90% or more sialylated glycans at the position corresponding to N41 of SEQ ID NO: 1. The level of sialylation may be measured by any suitable method, including those described in Gerhild Zauner et al., Electrophoresis. 2011 December; 32 (24): 3456-66. doi: 10.1002/elps.201100247, which is incorporated by reference herein in its entirety. The level of sialylation can be optimized by methods known in the art. A cell line may be selected for production of higher levels of sialylation. In addition or alternatively, purification methods may be used to enrich or isolate proteins with desired level of sialylation. In one example, a sample may be fractionated (e.g., by ion exchange chromatography) to enrich for products with desired (e.g., higher) level of sialylation.

### Heterologous Proteins

[0186] In another aspect, the isolated protein according to the present disclosure may comprise a mutant soluble ActRIIA-ECD or ActRIIB-ECD polypeptide and at least one heterologous protein attached to the ActRIIA-ECD or ActRIIB-ECD polypeptide either directly or through one or more linkers to form a fusion protein.

[0187] The term “heterologous” as used herein refers to a composition or state that is not native or naturally found, for example, that may be achieved by replacing an existing natural composition or state with one that is derived from another source. Similarly the expression of a protein in an organism other than the organism in which that protein is naturally expressed constitutes a heterologous expression system and a heterologous protein. In some examples, a fusion protein comprising Protein A and a heterologous Protein B may refer to the cases where the fusion protein is not naturally found.

[0188] As used herein the term “fusion protein” refers to a protein having a heterologous polypeptide attached (e.g., via recombinant DNA techniques). Examples of the heterologous proteins include a polyhistidine tag, a Glu-Glu, a glutathione S transferase (GST), a thioredoxin, a protein A, a protein G, a fluorescent protein, a maltose binding protein (MBP), a human serum albumin or an Fc polypeptide or Fc domain.

[0189] In some embodiments, the heterologous protein comprises a constant domain of an immunoglobulin, e.g., an Fc domain of an immunoglobulin. In various embodiments, the Fc domain is a human IgG Fc domain. The Fc domain may be the Fc domain of a human immunoglobulin gamma-1 (IgG1), the Fc domain of a human immunoglobulin gamma-2 (IgG2), or the Fc domain of a human immunoglobulin gamma-4 (IgG4). In various embodiments, the Fc domain is derived from the human IgG1 heavy chain constant domain sequence set forth in SEQ ID NO: 38. In various embodiments, the Fc domain comprises the amino acid sequence set forth in SEQ ID NO: 39. In various embodiments, the Fc domain is derived from the human IgG2 heavy chain constant domain sequence set forth in SEQ ID NO: 40. In various embodiments, the Fc domain comprises the amino acid sequence set forth in SEQ ID NO: 41. In various embodiments, the Fc domain is derived from the human IgG4 heavy chain constant domain sequence set forth in SEQ ID NO: 42. In some embodiments, the Fc domain is derived from the human IgG4 heavy chain constant domain sequence set forth in SEQ ID NO: 42 and comprises an S228P mutation. In various embodiments, the Fc domain comprises the amino acid sequence set forth in SEQ ID NO: 43. In some embodiments, the Fc domain of SEQ ID NO: 39, SEQ ID NO: 41 or SEQ ID NO: 43 may further comprise a lysine (K) residue at the C-terminus of the sequence.

[0190] In some embodiments, the Fc domains include mutations to eliminate glycosylation and/or to reduce Fc-gamma receptor binding. In some embodiments, the Fc domains are human Fc domains and comprise the mutation N297Q, N297A, or N297G; in some embodiments the human Fc domains comprise a mutation at position 234 and/or 235, for example L235E, or L234A and L235A (in IgG1), or F234A and L235A (in IgG4); in some embodiments the human Fc domains are IgG2 Fc domains that comprise the mutations V234A, G237A, P238S, H268Q/A, V309L, A330S, or P331S, or a combination thereof (all according to EU numbering).

[0191] Additional examples of modified human Fc domains are known to those skilled in the art. Examples of human IgG heavy chain constant region amino acids in which mutations in at least one amino acid leads to reduced Fc function include, but are not limited to, mutations in amino acid 228, 233, 234, 235, 236, 237, 239, 252, 254, 256, 265, 270, 297, 318, 320, 322, 327, 329, 330, and 331 of the heavy constant region (according to EU numbering). Examples of combinations of mutated amino acids are also known in the art, such as, but not limited to a combination of mutations in amino acids 234, 235, and 331, such as L234F, L235E, and P331S or a combination of amino acids 318, 320, and 322, such as E318A, K320A, and K322A. In some embodiments, the Fc domain comprises one or more substitutions selected from the group consisting of N297A in IgG1, N297Q in IgG1, and S228P in IgG4.

### Linkers

[0192] In some embodiments, the isolated protein according to the present disclosure may further comprise one or more linkers between two components in the isolated protein, e.g., between the mutant soluble ActRIIA-ECD or ActRIIB-ECD polypeptide and the heterologous protein (e.g., Fc domain). For example, the one or more linkers may serve as a spacer between a mutant soluble ActRIIA-ECD or ActRIIB-ECD polypeptide and a heterologous protein or other type of fusion, or between two or more mutant soluble ActRIIB-ECD polypeptides. In some examples, the heterologous protein may be attached to the mutant soluble ActRIIA-ECD or ActRIIB-ECD polypeptide via one or more linkers.

[0193] A linker may be a peptide sequence (e.g., an artificial peptide sequence). The linker may be relatively free from secondary structure. The linker may have from 1 to 50 amino acids in length. For example, a linker may have 1, 2, 3, 4, 5, 6, 7, 8, 9, 10, 11, 12, 13, 14, 15, 16, 17, 18, 19, 20, 21, 22, 23, 24, 25, 26, 27, 28, 29, 30, 31, 32, 33, 34, 35, 36, 37, 38, 39, 40, 41, 42, 43, 44, 45, 46, 47, 48, 49, or 50 amino acids in length. In some examples, the linker may more than 50 amino acids in length.

[0194] In various embodiments, the linkers may comprise amino acids selected from glycine, alanine, proline, asparagine, glutamine, and lysine. In various embodiments, a linker may be made up of a majority of amino acids that are sterically unhindered, such as glycine and alanine, and are polyglycines (e.g., (Gly) 5. (Gly) 8), poly(Gly-Ala), and polyalanines. In various embodiments, the linker may be rich in G/S content (e.g., at least about 60%, 70%, 80%, 90%, or more of the amino acids in the linker are G or S. In various embodiments, the linker has a (GGGGS (SEQ ID NO: 44)) n motif, wherein n=1-6. Examples of such linkers include those described extensively in art (see, e.g., U.S. Pat. No. 8,410,043 (Sun et al), incorporated by reference herein for the purposes of teaching such linkers).

[0195] In some examples, the linker may be a hinge linker, which comprises one or more amino acid residues (e.g., cysteines) capable of forming a covalent bond (hinge). When the fusion protein is multimerized (e.g., dimerized), one or more covalent bonds (e.g., disulfide bonds) may be formed between the hinge linkers on the monomers. An example of the hinge linker is a sequence of SEQ ID NO: 118.

[0196] In some examples, the isolated protein may comprise a linker comprising the amino acid sequence set forth in SEQ ID NO: 44 between the mutant ActRIIB polypeptide and the heterologous protein (e.g., Fc domain). In some examples, the isolated protein may comprise a hinge linker comprising the amino acid sequence set forth in SEQ ID NO: 118 between the mutant ActRIIB polypeptide and the heterologous protein (e.g., Fc domain). In some examples, the isolated protein may comprises a linker comprising the amino acid sequence set forth in SEQ ID NO: 44 and a hinge linker comprising the amino acid sequence set forth in SEQ ID NO: 118 between the mutant ActRIIB polypeptide and the heterologous protein (e.g., Fc domain).

[0197] In various embodiments, a linker having the amino acid sequence set forth in SEQ ID NO: 44 and a hinge linker having the amino acid sequence set forth in SEQ ID NO: 118 is used to link a human IgG1 Fc (SEQ ID NO: 39), a human IgG2 Fc (SEQ ID NO: 41), or a human IgG4 Fc (SEQ ID NO: 43) to a mutant soluble ActRIIA-ECD or ActRIIB-ECD polypeptide of the present disclosure.

[0198] Linkers may also be non-peptide linkers. For example, alkyl linkers such as —NH— (CH₂)ₛ—C(O)—, wherein s=2-20 can be used. These alkyl linkers may further be substituted by any non-sterically hindering group such as lower alkyl (e.g., C₁-C₆) lower acyl, halogen (e.g., Cl, Br), CN, NH₂, phenyl, etc.

### Isolated Proteins

[0199] It is understood that the different elements of the isolated proteins (e.g., the mutant soluble ActRIIB polypeptide, linker(s), and heterologous protein (e.g., Fc domain)) may be arranged in any manner that is consistent with the desired functionality.

[0200] For example, a heterologous protein may be attached (directly or indirectly) to the C-terminus of a mutant soluble ActRIIA-ECD or ActRIIB-ECD polypeptide. Alternatively, a heterologous protein may be attached (directly or indirectly) to the N-terminus of a mutant soluble ActRIIA-ECD or ActRIIB-ECD polypeptide. The mutant soluble ActRIIA-ECD or ActRIIB-ECD polypeptide and the heterologous domain need not be adjacent, and additional domains or amino acid sequences may be included C- or N-terminal to either domain or between the domains (e.g., include a linker described herein).

[0201] In the isolated proteins comprising the mutant soluble ActRIIA-ECD or ActRIIB-ECD and the heterologous protein (e.g., Fc domain), the removal of the N-linked glycosylation site on the mutant soluble ActRIIA-ECD or ActRIIB-ECD corresponding to position N18 of SEQ ID NO: 1 does not eliminate or affect glycosylation on other sites. For example, when the N-linked glycosylation site on the mutant soluble ActRIIA-ECD or ActRIIB-ECD corresponding to position N18 of SEQ ID NO: 1 is removed by mutation(s), the glycosylation on the amino acid residue(s) on the mutant ActRIIA-ECD or ActRIIB-ECD corresponding to N41 of SEQ ID NO: 1 and the amino acid residue(s) on the Fc domain (e.g., amino acid residue corresponding to position N67 of SEQ ID NO: 43) are not eliminated or affected.

[0202] In some embodiments, the isolated protein may be in a multimerized form. For example, the isolated protein may be in a dimerized form, e.g., forming a dimer through the heterologous protein, e.g., Fc domain. In some examples, a hinge may be formed between one or more amino acid residues of the monomers of the dimer. The one or more amino acid residues may be on the hinge linker. Alternatively or additionally, the one or more amino acid residues may be on the mutant soluble ActRIIB polypeptide and/or the heterologous protein.

[0203] The isolated protein may be a multimer comprising a plurality of monomers. In some examples, the monomers may be the same. In some examples, at least two of the monomers are different. In one example, a monomer may comprise a mutation that removes a glycosylation site (e.g., the mutations described herein) and another monomer does not comprise such mutation. In some examples, the isolated protein may be a dimer comprising two monomers. In one example, the two monomers may be the same. In another example, the two monomers may be different.

[0204] In some embodiments, the isolated protein may comprise a signal peptide. When the protein is expressed in a cell, the signal peptide may be present at the N-terminus of the protein and prompt the cell to secret the protein. Examples of signal sequences include any of SEQ ID NOs: 49 or 50. In some embodiments, the isolated protein does not have a signal peptide.

[0205] In some examples, an isolated protein may be a fusion protein comprising, in an N-terminus to C-terminus direction, mutant soluble ActRIIA-ECD or ActRIIB-ECD polypeptide, one or more linkers, and a heterologous protein (e.g., Fc domain). In some examples, an isolated protein may be a fusion protein comprising, in an N-terminus to C-terminus direction, a signal peptide, a mutant soluble ActRIIA-ECD or ActRIIB-ECD polypeptide, one or more linkers, and a heterologous protein (e.g., Fc domain).

[0206] In some examples, an isolated protein may be a fusion protein comprising, in an N-terminus to C-terminus direction, a heterologous protein (e.g., Fc domain), one or more linkers, and a mutant soluble ActRIIB polypeptide. In some examples, an isolated protein may be a fusion protein comprising, in an N-terminus to C-terminus direction, a signal peptide, a heterologous protein (e.g., Fc domain), one or more linkers, and a mutant soluble ActRIIA-ECD or ActRIIB-ECD polypeptide.

[0207] An example of the isolated protein may comprise SEQ ID NO: 222. Another example of the isolated protein may consist of SEQ ID NO: 222. Further examples of isolated proteins include those described in Tables 2-7 below. Each row of the tables describes an isolated protein comprising or consisting of the components from an N-terminus to C-terminus direction. Fusion proteins described in Tables 2-4 may further comprise a signal peptide of SEQ ID NO: 49. Fusion proteins described in Tables 5-7 may further comprise a signal peptide of SEQ ID NO: 50. Any of the fusion proteins may further comprise a C-terminal lysine on the heterologous protein of SEQ ID NO: 39, 41 or 43.

TABLE 2
Example configurations of fusion proteins
Components (from an N-terminus to C-terminus direction)

| Mutant Soluble | | Heterologous |
|---|---|---|
| ActRIIB-ECD polypeptide | Linker(s) | Protein |
| SEQ ID NO: 119 | SEQ ID NOs: 44 and 118 | SEQ ID NO: 39 |
| SEQ ID NO: 120 | SEQ ID NOs: 44 and 118 | SEQ ID NO: 39 |
| SEQ ID NO: 121 | SEQ ID NOs: 44 and 118 | SEQ ID NO: 39 |
| SEQ ID NO: 122 | SEQ ID NOs: 44 and 118 | SEQ ID NO: 39 |
| SEQ ID NO: 123 | SEQ ID NOs: 44 and 118 | SEQ ID NO: 39 |
| SEQ ID NO: 124 | SEQ ID NOs: 44 and 118 | SEQ ID NO: 39 |
| SEQ ID NO: 125 | SEQ ID NOs: 44 and 118 | SEQ ID NO: 39 |
| SEQ ID NO: 126 | SEQ ID NOs: 44 and 118 | SEQ ID NO: 39 |
| SEQ ID NO: 127 | SEQ ID NOs: 44 and 118 | SEQ ID NO: 39 |
| SEQ ID NO: 128 | SEQ ID NOs: 44 and 118 | SEQ ID NO: 39 |
| SEQ ID NO: 129 | SEQ ID NOs: 44 and 118 | SEQ ID NO: 39 |
| SEQ ID NO: 130 | SEQ ID NOs: 44 and 118 | SEQ ID NO: 39 |
| SEQ ID NO: 131 | SEQ ID NOs: 44 and 118 | SEQ ID NO: 39 |
| SEQ ID NO: 132 | SEQ ID NOs: 44 and 118 | SEQ ID NO: 39 |
| SEQ ID NO: 133 | SEQ ID NOs: 44 and 118 | SEQ ID NO: 39 |
| SEQ ID NO: 134 | SEQ ID NOs: 44 and 118 | SEQ ID NO: 39 |
| SEQ ID NO: 135 | SEQ ID NOs: 44 and 118 | SEQ ID NO: 39 |
| SEQ ID NO: 136 | SEQ ID NOs: 44 and 118 | SEQ ID NO: 39 |
| SEQ ID NO: 137 | SEQ ID NOs: 44 and 118 | SEQ ID NO: 39 |
| SEQ ID NO: 138 | SEQ ID NOs: 44 and 118 | SEQ ID NO: 39 |
| SEQ ID NO: 139 | SEQ ID NOs: 44 and 118 | SEQ ID NO: 39 |
| SEQ ID NO: 140 | SEQ ID NOs: 44 and 118 | SEQ ID NO: 39 |
| SEQ ID NO: 141 | SEQ ID NOs: 44 and 118 | SEQ ID NO: 39 |
| SEQ ID NO: 142 | SEQ ID NOs: 44 and 118 | SEQ ID NO: 39 |
| SEQ ID NO: 143 | SEQ ID NOs: 44 and 118 | SEQ ID NO: 39 |
| SEQ ID NO: 144 | SEQ ID NOs: 44 and 118 | SEQ ID NO: 39 |
| SEQ ID NO: 145 | SEQ ID NOs: 44 and 118 | SEQ ID NO: 39 |
| SEQ ID NO: 146 | SEQ ID NOs: 44 and 118 | SEQ ID NO: 39 |
| SEQ ID NO: 147 | SEQ ID NOs: 44 and 118 | SEQ ID NO: 39 |
| SEQ ID NO: 148 | SEQ ID NOs: 44 and 118 | SEQ ID NO: 39 |
| SEQ ID NO: 149 | SEQ ID NOs: 44 and 118 | SEQ ID NO: 39 |
| SEQ ID NO: 150 | SEQ ID NOs: 44 and 118 | SEQ ID NO: 39 |
| SEQ ID NO: 151 | SEQ ID NOs: 44 and 118 | SEQ ID NO: 39 |
| SEQ ID NO: 152 | SEQ ID NOs: 44 and 118 | SEQ ID NO: 39 |
| SEQ ID NO: 153 | SEQ ID NOs: 44 and 118 | SEQ ID NO: 39 |
| SEQ ID NO: 154 | SEQ ID NOs: 44 and 118 | SEQ ID NO: 39 |
| SEQ ID NO: 155 | SEQ ID NOs: 44 and 118 | SEQ ID NO: 39 |
| SEQ ID NO: 156 | SEQ ID NOs: 44 and 118 | SEQ ID NO: 39 |
| SEQ ID NO: 157 | SEQ ID NOs: 44 and 118 | SEQ ID NO: 39 |
| SEQ ID NO: 158 | SEQ ID NOs: 44 and 118 | SEQ ID NO: 39 |
| SEQ ID NO: 159 | SEQ ID NOs: 44 and 118 | SEQ ID NO: 39 |
| SEQ ID NO: 160 | SEQ ID NOs: 44 and 118 | SEQ ID NO: 39 |
| SEQ ID NO: 161 | SEQ ID NOs: 44 and 118 | SEQ ID NO: 39 |
| SEQ ID NO: 162 | SEQ ID NOs: 44 and 118 | SEQ ID NO: 39 |
| SEQ ID NO: 163 | SEQ ID NOs: 44 and 118 | SEQ ID NO: 39 |
| SEQ ID NO: 164 | SEQ ID NOs: 44 and 118 | SEQ ID NO: 39 |
| SEQ ID NO: 165 | SEQ ID NOs: 44 and 118 | SEQ ID NO: 39 |
| SEQ ID NO: 166 | SEQ ID NOs: 44 and 118 | SEQ ID NO: 39 |
| SEQ ID NO: 167 | SEQ ID NOs: 44 and 118 | SEQ ID NO: 39 |
| SEQ ID NO: 168 | SEQ ID NOs: 44 and 118 | SEQ ID NO: 39 |
| SEQ ID NO: 169 | SEQ ID NOs: 44 and 118 | SEQ ID NO: 39 |
| SEQ ID NO: 170 | SEQ ID NOs: 44 and 118 | SEQ ID NO: 39 |
| SEQ ID NO: 171 | SEQ ID NOs: 44 and 118 | SEQ ID NO: 39 |
| SEQ ID NO: 172 | SEQ ID NOs: 44 and 118 | SEQ ID NO: 39 |
| SEQ ID NO: 173 | SEQ ID NOs: 44 and 118 | SEQ ID NO: 39 |
| SEQ ID NO: 174 | SEQ ID NOs: 44 and 118 | SEQ ID NO: 39 |
| SEQ ID NO: 175 | SEQ ID NOs: 44 and 118 | SEQ ID NO: 39 |
| SEQ ID NO: 176 | SEQ ID NOs: 44 and 118 | SEQ ID NO: 39 |
| SEQ ID NO: 177 | SEQ ID NOs: 44 and 118 | SEQ ID NO: 39 |
| SEQ ID NO: 178 | SEQ ID NOs: 44 and 118 | SEQ ID NO: 39 |
| SEQ ID NO: 179 | SEQ ID NOs: 44 and 118 | SEQ ID NO: 39 |
| SEQ ID NO: 180 | SEQ ID NOs: 44 and 118 | SEQ ID NO: 39 |
| SEQ ID NO: 181 | SEQ ID NOs: 44 and 118 | SEQ ID NO: 39 |
| SEQ ID NO: 182 | SEQ ID NOs: 44 and 118 | SEQ ID NO: 39 |
| SEQ ID NO: 183 | SEQ ID NOs: 44 and 118 | SEQ ID NO: 39 |
| SEQ ID NO: 184 | SEQ ID NOs: 44 and 118 | SEQ ID NO: 39 |
| SEQ ID NO: 185 | SEQ ID NOs: 44 and 118 | SEQ ID NO: 39 |
| SEQ ID NO: 186 | SEQ ID NOs: 44 and 118 | SEQ ID NO: 39 |
| SEQ ID NO: 187 | SEQ ID NOs: 44 and 118 | SEQ ID NO: 39 |
| SEQ ID NO: 188 | SEQ ID NOs: 44 and 118 | SEQ ID NO: 39 |
| SEQ ID NO: 189 | SEQ ID NOs: 44 and 118 | SEQ ID NO: 39 |
| SEQ ID NO: 190 | SEQ ID NOs: 44 and 118 | SEQ ID NO: 39 |
| SEQ ID NO: 191 | SEQ ID NOs: 44 and 118 | SEQ ID NO: 39 |
| SEQ ID NO: 192 | SEQ ID NOs: 44 and 118 | SEQ ID NO: 39 |
| SEQ ID NO: 193 | SEQ ID NOs: 44 and 118 | SEQ ID NO: 39 |
| SEQ ID NO: 194 | SEQ ID NOs: 44 and 118 | SEQ ID NO: 39 |
| SEQ ID NO: 195 | SEQ ID NOs: 44 and 118 | SEQ ID NO: 39 |
| SEQ ID NO: 196 | SEQ ID NOs: 44 and 118 | SEQ ID NO: 39 |
| SEQ ID NO: 197 | SEQ ID NOs: 44 and 118 | SEQ ID NO: 39 |
| SEQ ID NO: 198 | SEQ ID NOs: 44 and 118 | SEQ ID NO: 39 |
| SEQ ID NO: 199 | SEQ ID NOs: 44 and 118 | SEQ ID NO: 39 |
| SEQ ID NO: 200 | SEQ ID NOs: 44 and 118 | SEQ ID NO: 39 |
| SEQ ID NO: 201 | SEQ ID NOs: 44 and 118 | SEQ ID NO: 39 |
| SEQ ID NO: 202 | SEQ ID NOs: 44 and 118 | SEQ ID NO: 39 |
| SEQ ID NO: 203 | SEQ ID NOs: 44 and 118 | SEQ ID NO: 39 |
| SEQ ID NO: 204 | SEQ ID NOs: 44 and 118 | SEQ ID NO: 39 |
| SEQ ID NO: 205 | SEQ ID NOs: 44 and 118 | SEQ ID NO: 39 |
| SEQ ID NO: 206 | SEQ ID NOs: 44 and 118 | SEQ ID NO: 39 |
| SEQ ID NO: 207 | SEQ ID NOs: 44 and 118 | SEQ ID NO: 39 |
| SEQ ID NO: 208 | SEQ ID NOs: 44 and 118 | SEQ ID NO: 39 |
| SEQ ID NO: 209 | SEQ ID NOs: 44 and 118 | SEQ ID NO: 39 |
| SEQ ID NO: 210 | SEQ ID NOs: 44 and 118 | SEQ ID NO: 39 |
| SEQ ID NO: 211 | SEQ ID NOs: 44 and 118 | SEQ ID NO: 39 |
| SEQ ID NO: 212 | SEQ ID NOs: 44 and 118 | SEQ ID NO: 39 |
| SEQ ID NO: 213 | SEQ ID NOs: 44 and 118 | SEQ ID NO: 39 |
| SEQ ID NO: 214 | SEQ ID NOs: 44 and 118 | SEQ ID NO: 39 |
| SEQ ID NO: 215 | SEQ ID NOs: 44 and 118 | SEQ ID NO: 39 |
| SEQ ID NO: 216 | SEQ ID NOs: 44 and 118 | SEQ ID NO: 39 |
| SEQ ID NO: 217 | SEQ ID NOs: 44 and 118 | SEQ ID NO: 39 |
| SEQ ID NO: 218 | SEQ ID NOs: 44 and 118 | SEQ ID NO: 39 |
| SEQ ID NO: 219 | SEQ ID NOs: 44 and 118 | SEQ ID NO: 39 |
| SEQ ID NO: 220 | SEQ ID NOs: 44 and 118 | SEQ ID NO: 39 |
| SEQ ID NO: 221 | SEQ ID NOs: 44 and 118 | SEQ ID NO: 39 |
| SEQ ID NO: 329 | SEQ ID NOs: 44 and 118 | SEQ ID NO: 39 |
| SEQ ID NO: 332 | SEQ ID NOs: 44 and 118 | SEQ ID NO: 39 |
| SEQ ID NO: 335 | SEQ ID NOs: 44 and 118 | SEQ ID NO: 39 |
| SEQ ID NO: 119 | SEQ ID NOs: 44 and 118 | SEQ ID NO: 41 |
| SEQ ID NO: 120 | SEQ ID NOs: 44 and 118 | SEQ ID NO: 41 |
| SEQ ID NO: 121 | SEQ ID NOs: 44 and 118 | SEQ ID NO: 41 |
| SEQ ID NO: 122 | SEQ ID NOs: 44 and 118 | SEQ ID NO: 41 |
| SEQ ID NO: 123 | SEQ ID NOs: 44 and 118 | SEQ ID NO: 41 |
| SEQ ID NO: 124 | SEQ ID NOs: 44 and 118 | SEQ ID NO: 41 |
| SEQ ID NO: 125 | SEQ ID NOs: 44 and 118 | SEQ ID NO: 41 |
| SEQ ID NO: 126 | SEQ ID NOs: 44 and 118 | SEQ ID NO: 41 |
| SEQ ID NO: 127 | SEQ ID NOs: 44 and 118 | SEQ ID NO: 41 |
| SEQ ID NO: 128 | SEQ ID NOs: 44 and 118 | SEQ ID NO: 41 |
| SEQ ID NO: 129 | SEQ ID NOs: 44 and 118 | SEQ ID NO: 41 |
| SEQ ID NO: 130 | SEQ ID NOs: 44 and 118 | SEQ ID NO: 41 |
| SEQ ID NO: 131 | SEQ ID NOs: 44 and 118 | SEQ ID NO: 41 |
| SEQ ID NO: 132 | SEQ ID NOs: 44 and 118 | SEQ ID NO: 41 |
| SEQ ID NO: 133 | SEQ ID NOs: 44 and 118 | SEQ ID NO: 41 |
| SEQ ID NO: 134 | SEQ ID NOs: 44 and 118 | SEQ ID NO: 41 |
| SEQ ID NO: 135 | SEQ ID NOs: 44 and 118 | SEQ ID NO: 41 |
| SEQ ID NO: 136 | SEQ ID NOs: 44 and 118 | SEQ ID NO: 41 |
| SEQ ID NO: 137 | SEQ ID NOs: 44 and 118 | SEQ ID NO: 41 |
| SEQ ID NO: 138 | SEQ ID NOs: 44 and 118 | SEQ ID NO: 41 |
| SEQ ID NO: 139 | SEQ ID NOs: 44 and 118 | SEQ ID NO: 41 |
| SEQ ID NO: 140 | SEQ ID NOs: 44 and 118 | SEQ ID NO: 41 |
| SEQ ID NO: 141 | SEQ ID NOs: 44 and 118 | SEQ ID NO: 41 |
| SEQ ID NO: 142 | SEQ ID NOs: 44 and 118 | SEQ ID NO: 41 |
| SEQ ID NO: 143 | SEQ ID NOs: 44 and 118 | SEQ ID NO: 41 |
| SEQ ID NO: 144 | SEQ ID NOs: 44 and 118 | SEQ ID NO: 41 |
| SEQ ID NO: 145 | SEQ ID NOs: 44 and 118 | SEQ ID NO: 41 |
| SEQ ID NO: 146 | SEQ ID NOs: 44 and 118 | SEQ ID NO: 41 |
| SEQ ID NO: 147 | SEQ ID NOs: 44 and 118 | SEQ ID NO: 41 |
| SEQ ID NO: 148 | SEQ ID NOs: 44 and 118 | SEQ ID NO: 41 |
| SEQ ID NO: 149 | SEQ ID NOs: 44 and 118 | SEQ ID NO: 41 |
| SEQ ID NO: 150 | SEQ ID NOs: 44 and 118 | SEQ ID NO: 41 |
| SEQ ID NO: 151 | SEQ ID NOs: 44 and 118 | SEQ ID NO: 41 |
| SEQ ID NO: 152 | SEQ ID NOs: 44 and 118 | SEQ ID NO: 41 |
| SEQ ID NO: 153 | SEQ ID NOs: 44 and 118 | SEQ ID NO: 41 |
| SEQ ID NO: 154 | SEQ ID NOs: 44 and 118 | SEQ ID NO: 41 |
| SEQ ID NO: 155 | SEQ ID NOs: 44 and 118 | SEQ ID NO: 41 |
| SEQ ID NO: 156 | SEQ ID NOs: 44 and 118 | SEQ ID NO: 41 |
| SEQ ID NO: 157 | SEQ ID NOs: 44 and 118 | SEQ ID NO: 41 |
| SEQ ID NO: 158 | SEQ ID NOs: 44 and 118 | SEQ ID NO: 41 |
| SEQ ID NO: 159 | SEQ ID NOs: 44 and 118 | SEQ ID NO: 41 |
| SEQ ID NO: 160 | SEQ ID NOs: 44 and 118 | SEQ ID NO: 41 |
| SEQ ID NO: 161 | SEQ ID NOs: 44 and 118 | SEQ ID NO: 41 |
| SEQ ID NO: 162 | SEQ ID NOs: 44 and 118 | SEQ ID NO: 41 |
| SEQ ID NO: 163 | SEQ ID NOs: 44 and 118 | SEQ ID NO: 41 |
| SEQ ID NO: 164 | SEQ ID NOs: 44 and 118 | SEQ ID NO: 41 |
| SEQ ID NO: 165 | SEQ ID NOs: 44 and 118 | SEQ ID NO: 41 |
| SEQ ID NO: 166 | SEQ ID NOs: 44 and 118 | SEQ ID NO: 41 |
| SEQ ID NO: 167 | SEQ ID NOs: 44 and 118 | SEQ ID NO: 41 |
| SEQ ID NO: 168 | SEQ ID NOs: 44 and 118 | SEQ ID NO: 41 |
| SEQ ID NO: 169 | SEQ ID NOs: 44 and 118 | SEQ ID NO: 41 |
| SEQ ID NO: 170 | SEQ ID NOs: 44 and 118 | SEQ ID NO: 41 |
| SEQ ID NO: 171 | SEQ ID NOs: 44 and 118 | SEQ ID NO: 41 |
| SEQ ID NO: 172 | SEQ ID NOs: 44 and 118 | SEQ ID NO: 41 |
| SEQ ID NO: 173 | SEQ ID NOs: 44 and 118 | SEQ ID NO: 41 |
| SEQ ID NO: 174 | SEQ ID NOs: 44 and 118 | SEQ ID NO: 41 |
| SEQ ID NO: 175 | SEQ ID NOs: 44 and 118 | SEQ ID NO: 41 |
| SEQ ID NO: 176 | SEQ ID NOs: 44 and 118 | SEQ ID NO: 41 |
| SEQ ID NO: 177 | SEQ ID NOs: 44 and 118 | SEQ ID NO: 41 |
| SEQ ID NO: 178 | SEQ ID NOs: 44 and 118 | SEQ ID NO: 41 |
| SEQ ID NO: 179 | SEQ ID NOs: 44 and 118 | SEQ ID NO: 41 |
| SEQ ID NO: 180 | SEQ ID NOs: 44 and 118 | SEQ ID NO: 41 |
| SEQ ID NO: 181 | SEQ ID NOs: 44 and 118 | SEQ ID NO: 41 |
| SEQ ID NO: 182 | SEQ ID NOs: 44 and 118 | SEQ ID NO: 41 |
| SEQ ID NO: 183 | SEQ ID NOs: 44 and 118 | SEQ ID NO: 41 |
| SEQ ID NO: 184 | SEQ ID NOs: 44 and 118 | SEQ ID NO: 41 |
| SEQ ID NO: 185 | SEQ ID NOs: 44 and 118 | SEQ ID NO: 41 |
| SEQ ID NO: 186 | SEQ ID NOs: 44 and 118 | SEQ ID NO: 41 |
| SEQ ID NO: 187 | SEQ ID NOs: 44 and 118 | SEQ ID NO: 41 |
| SEQ ID NO: 188 | SEQ ID NOs: 44 and 118 | SEQ ID NO: 41 |
| SEQ ID NO: 189 | SEQ ID NOs: 44 and 118 | SEQ ID NO: 41 |
| SEQ ID NO: 190 | SEQ ID NOs: 44 and 118 | SEQ ID NO: 41 |
| SEQ ID NO: 191 | SEQ ID NOs: 44 and 118 | SEQ ID NO: 41 |
| SEQ ID NO: 192 | SEQ ID NOs: 44 and 118 | SEQ ID NO: 41 |
| SEQ ID NO: 193 | SEQ ID NOs: 44 and 118 | SEQ ID NO: 41 |
| SEQ ID NO: 194 | SEQ ID NOs: 44 and 118 | SEQ ID NO: 41 |
| SEQ ID NO: 195 | SEQ ID NOs: 44 and 118 | SEQ ID NO: 41 |
| SEQ ID NO: 196 | SEQ ID NOs: 44 and 118 | SEQ ID NO: 41 |
| SEQ ID NO: 197 | SEQ ID NOs: 44 and 118 | SEQ ID NO: 41 |
| SEQ ID NO: 198 | SEQ ID NOs: 44 and 118 | SEQ ID NO: 41 |
| SEQ ID NO: 199 | SEQ ID NOs: 44 and 118 | SEQ ID NO: 41 |
| SEQ ID NO: 200 | SEQ ID NOs: 44 and 118 | SEQ ID NO: 41 |
| SEQ ID NO: 201 | SEQ ID NOs: 44 and 118 | SEQ ID NO: 41 |
| SEQ ID NO: 202 | SEQ ID NOs: 44 and 118 | SEQ ID NO: 41 |
| SEQ ID NO: 203 | SEQ ID NOs: 44 and 118 | SEQ ID NO: 41 |
| SEQ ID NO: 204 | SEQ ID NOs: 44 and 118 | SEQ ID NO: 41 |
| SEQ ID NO: 205 | SEQ ID NOs: 44 and 118 | SEQ ID NO: 41 |
| SEQ ID NO: 206 | SEQ ID NOs: 44 and 118 | SEQ ID NO: 41 |
| SEQ ID NO: 207 | SEQ ID NOs: 44 and 118 | SEQ ID NO: 41 |
| SEQ ID NO: 208 | SEQ ID NOs: 44 and 118 | SEQ ID NO: 41 |
| SEQ ID NO: 209 | SEQ ID NOs: 44 and 118 | SEQ ID NO: 41 |
| SEQ ID NO: 210 | SEQ ID NOs: 44 and 118 | SEQ ID NO: 41 |
| SEQ ID NO: 211 | SEQ ID NOs: 44 and 118 | SEQ ID NO: 41 |
| SEQ ID NO: 212 | SEQ ID NOs: 44 and 118 | SEQ ID NO: 41 |
| SEQ ID NO: 213 | SEQ ID NOs: 44 and 118 | SEQ ID NO: 41 |
| SEQ ID NO: 214 | SEQ ID NOs: 44 and 118 | SEQ ID NO: 41 |
| SEQ ID NO: 215 | SEQ ID NOs: 44 and 118 | SEQ ID NO: 41 |
| SEQ ID NO: 216 | SEQ ID NOs: 44 and 118 | SEQ ID NO: 41 |
| SEQ ID NO: 217 | SEQ ID NOs: 44 and 118 | SEQ ID NO: 41 |
| SEQ ID NO: 218 | SEQ ID NOs: 44 and 118 | SEQ ID NO: 41 |
| SEQ ID NO: 219 | SEQ ID NOs: 44 and 118 | SEQ ID NO: 41 |
| SEQ ID NO: 220 | SEQ ID NOs: 44 and 118 | SEQ ID NO: 41 |
| SEQ ID NO: 221 | SEQ ID NOs: 44 and 118 | SEQ ID NO: 41 |
| SEQ ID NO: 329 | SEQ ID NOs: 44 and 118 | SEQ ID NO: 41 |
| SEQ ID NO: 332 | SEQ ID NOs: 44 and 118 | SEQ ID NO: 41 |
| SEQ ID NO: 335 | SEQ ID NOs: 44 and 118 | SEQ ID NO: 41 |
| SEQ ID NO: 119 | SEQ ID NOs: 44 and 118 | SEQ ID NO: 41 |
| SEQ ID NO: 120 | SEQ ID NOs: 44 and 118 | SEQ ID NO: 43 |
| SEQ ID NO: 121 | SEQ ID NOs: 44 and 118 | SEQ ID NO: 43 |
| SEQ ID NO: 122 | SEQ ID NOs: 44 and 118 | SEQ ID NO: 43 |
| SEQ ID NO: 123 | SEQ ID NOs: 44 and 118 | SEQ ID NO: 43 |
| SEQ ID NO: 124 | SEQ ID NOs: 44 and 118 | SEQ ID NO: 43 |
| SEQ ID NO: 125 | SEQ ID NOs: 44 and 118 | SEQ ID NO: 43 |
| SEQ ID NO: 126 | SEQ ID NOs: 44 and 118 | SEQ ID NO: 43 |
| SEQ ID NO: 127 | SEQ ID NOs: 44 and 118 | SEQ ID NO: 43 |
| SEQ ID NO: 128 | SEQ ID NOs: 44 and 118 | SEQ ID NO: 43 |
| SEQ ID NO: 129 | SEQ ID NOs: 44 and 118 | SEQ ID NO: 43 |
| SEQ ID NO: 130 | SEQ ID NOs: 44 and 118 | SEQ ID NO: 43 |
| SEQ ID NO: 131 | SEQ ID NOs: 44 and 118 | SEQ ID NO: 43 |
| SEQ ID NO: 132 | SEQ ID NOs: 44 and 118 | SEQ ID NO: 43 |
| SEQ ID NO: 133 | SEQ ID NOs: 44 and 118 | SEQ ID NO: 43 |
| SEQ ID NO: 134 | SEQ ID NOs: 44 and 118 | SEQ ID NO: 43 |
| SEQ ID NO: 135 | SEQ ID NOs: 44 and 118 | SEQ ID NO: 43 |
| SEQ ID NO: 136 | SEQ ID NOs: 44 and 118 | SEQ ID NO: 43 |
| SEQ ID NO: 137 | SEQ ID NOs: 44 and 118 | SEQ ID NO: 43 |
| SEQ ID NO: 138 | SEQ ID NOs: 44 and 118 | SEQ ID NO: 43 |
| SEQ ID NO: 139 | SEQ ID NOs: 44 and 118 | SEQ ID NO: 43 |
| SEQ ID NO: 140 | SEQ ID NOs: 44 and 118 | SEQ ID NO: 43 |
| SEQ ID NO: 141 | SEQ ID NOs: 44 and 118 | SEQ ID NO: 43 |
| SEQ ID NO: 142 | SEQ ID NOs: 44 and 118 | SEQ ID NO: 43 |
| SEQ ID NO: 143 | SEQ ID NOs: 44 and 118 | SEQ ID NO: 43 |
| SEQ ID NO: 144 | SEQ ID NOs: 44 and 118 | SEQ ID NO: 43 |
| SEQ ID NO: 145 | SEQ ID NOs: 44 and 118 | SEQ ID NO: 43 |
| SEQ ID NO: 146 | SEQ ID NOs: 44 and 118 | SEQ ID NO: 43 |
| SEQ ID NO: 147 | SEQ ID NOs: 44 and 118 | SEQ ID NO: 43 |
| SEQ ID NO: 148 | SEQ ID NOs: 44 and 118 | SEQ ID NO: 43 |
| SEQ ID NO: 149 | SEQ ID NOs: 44 and 118 | SEQ ID NO: 43 |
| SEQ ID NO: 150 | SEQ ID NOs: 44 and 118 | SEQ ID NO: 43 |
| SEQ ID NO: 151 | SEQ ID NOs: 44 and 118 | SEQ ID NO: 43 |
| SEQ ID NO: 152 | SEQ ID NOs: 44 and 118 | SEQ ID NO: 43 |
| SEQ ID NO: 153 | SEQ ID NOs: 44 and 118 | SEQ ID NO: 43 |
| SEQ ID NO: 154 | SEQ ID NOs: 44 and 118 | SEQ ID NO: 43 |
| SEQ ID NO: 155 | SEQ ID NOs: 44 and 118 | SEQ ID NO: 43 |
| SEQ ID NO: 156 | SEQ ID NOs: 44 and 118 | SEQ ID NO: 43 |
| SEQ ID NO: 157 | SEQ ID NOs: 44 and 118 | SEQ ID NO: 43 |
| SEQ ID NO: 158 | SEQ ID NOs: 44 and 118 | SEQ ID NO: 43 |
| SEQ ID NO: 159 | SEQ ID NOs: 44 and 118 | SEQ ID NO: 43 |
| SEQ ID NO: 160 | SEQ ID NOs: 44 and 118 | SEQ ID NO: 43 |
| SEQ ID NO: 161 | SEQ ID NOs: 44 and 118 | SEQ ID NO: 43 |
| SEQ ID NO: 162 | SEQ ID NOs: 44 and 118 | SEQ ID NO: 43 |
| SEQ ID NO: 163 | SEQ ID NOs: 44 and 118 | SEQ ID NO: 43 |
| SEQ ID NO: 164 | SEQ ID NOs: 44 and 118 | SEQ ID NO: 43 |
| SEQ ID NO: 165 | SEQ ID NOs: 44 and 118 | SEQ ID NO: 43 |
| SEQ ID NO: 166 | SEQ ID NOs: 44 and 118 | SEQ ID NO: 43 |
| SEQ ID NO: 167 | SEQ ID NOs: 44 and 118 | SEQ ID NO: 43 |
| SEQ ID NO: 168 | SEQ ID NOs: 44 and 118 | SEQ ID NO: 43 |
| SEQ ID NO: 169 | SEQ ID NOs: 44 and 118 | SEQ ID NO: 43 |
| SEQ ID NO: 170 | SEQ ID NOs: 44 and 118 | SEQ ID NO: 43 |
| SEQ ID NO: 171 | SEQ ID NOs: 44 and 118 | SEQ ID NO: 43 |
| SEQ ID NO: 172 | SEQ ID NOs: 44 and 118 | SEQ ID NO: 43 |
| SEQ ID NO: 173 | SEQ ID NOs: 44 and 118 | SEQ ID NO: 43 |
| SEQ ID NO: 174 | SEQ ID NOs: 44 and 118 | SEQ ID NO: 43 |
| SEQ ID NO: 175 | SEQ ID NOs: 44 and 118 | SEQ ID NO: 43 |
| SEQ ID NO: 176 | SEQ ID NOs: 44 and 118 | SEQ ID NO: 43 |
| SEQ ID NO: 177 | SEQ ID NOs: 44 and 118 | SEQ ID NO: 43 |
| SEQ ID NO: 178 | SEQ ID NOs: 44 and 118 | SEQ ID NO: 43 |
| SEQ ID NO: 179 | SEQ ID NOs: 44 and 118 | SEQ ID NO: 43 |
| SEQ ID NO: 180 | SEQ ID NOs: 44 and 118 | SEQ ID NO: 43 |
| SEQ ID NO: 181 | SEQ ID NOs: 44 and 118 | SEQ ID NO: 43 |
| SEQ ID NO: 182 | SEQ ID NOs: 44 and 118 | SEQ ID NO: 43 |
| SEQ ID NO: 183 | SEQ ID NOs: 44 and 118 | SEQ ID NO: 43 |
| SEQ ID NO: 184 | SEQ ID NOs: 44 and 118 | SEQ ID NO: 43 |
| SEQ ID NO: 185 | SEQ ID NOs: 44 and 118 | SEQ ID NO: 43 |
| SEQ ID NO: 186 | SEQ ID NOs: 44 and 118 | SEQ ID NO: 43 |
| SEQ ID NO: 187 | SEQ ID NOs: 44 and 118 | SEQ ID NO: 43 |
| SEQ ID NO: 188 | SEQ ID NOs: 44 and 118 | SEQ ID NO: 43 |
| SEQ ID NO: 189 | SEQ ID NOs: 44 and 118 | SEQ ID NO: 43 |
| SEQ ID NO: 190 | SEQ ID NOs: 44 and 118 | SEQ ID NO: 43 |
| SEQ ID NO: 191 | SEQ ID NOs: 44 and 118 | SEQ ID NO: 43 |
| SEQ ID NO: 192 | SEQ ID NOs: 44 and 118 | SEQ ID NO: 43 |
| SEQ ID NO: 193 | SEQ ID NOs: 44 and 118 | SEQ ID NO: 43 |
| SEQ ID NO: 194 | SEQ ID NOs: 44 and 118 | SEQ ID NO: 43 |
| SEQ ID NO: 195 | SEQ ID NOs: 44 and 118 | SEQ ID NO: 43 |
| SEQ ID NO: 196 | SEQ ID NOs: 44 and 118 | SEQ ID NO: 43 |
| SEQ ID NO: 197 | SEQ ID NOs: 44 and 118 | SEQ ID NO: 43 |
| SEQ ID NO: 198 | SEQ ID NOs: 44 and 118 | SEQ ID NO: 43 |
| SEQ ID NO: 199 | SEQ ID NOs: 44 and 118 | SEQ ID NO: 43 |
| SEQ ID NO: 200 | SEQ ID NOs: 44 and 118 | SEQ ID NO: 43 |
| SEQ ID NO: 201 | SEQ ID NOs: 44 and 118 | SEQ ID NO: 43 |
| SEQ ID NO: 202 | SEQ ID NOs: 44 and 118 | SEQ ID NO: 43 |
| SEQ ID NO: 203 | SEQ ID NOs: 44 and 118 | SEQ ID NO: 43 |
| SEQ ID NO: 204 | SEQ ID NOs: 44 and 118 | SEQ ID NO: 43 |
| SEQ ID NO: 205 | SEQ ID NOs: 44 and 118 | SEQ ID NO: 43 |
| SEQ ID NO: 206 | SEQ ID NOs: 44 and 118 | SEQ ID NO: 43 |
| SEQ ID NO: 207 | SEQ ID NOs: 44 and 118 | SEQ ID NO: 43 |
| SEQ ID NO: 208 | SEQ ID NOs: 44 and 118 | SEQ ID NO: 43 |
| SEQ ID NO: 209 | SEQ ID NOs: 44 and 118 | SEQ ID NO: 43 |
| SEQ ID NO: 210 | SEQ ID NOs: 44 and 118 | SEQ ID NO: 43 |
| SEQ ID NO: 211 | SEQ ID NOs: 44 and 118 | SEQ ID NO: 43 |
| SEQ ID NO: 212 | SEQ ID NOs: 44 and 118 | SEQ ID NO: 43 |
| SEQ ID NO: 213 | SEQ ID NOs: 44 and 118 | SEQ ID NO: 43 |
| SEQ ID NO: 214 | SEQ ID NOs: 44 and 118 | SEQ ID NO: 43 |
| SEQ ID NO: 215 | SEQ ID NOs: 44 and 118 | SEQ ID NO: 43 |
| SEQ ID NO: 216 | SEQ ID NOs: 44 and 118 | SEQ ID NO: 43 |
| SEQ ID NO: 217 | SEQ ID NOs: 44 and 118 | SEQ ID NO: 43 |
| SEQ ID NO: 218 | SEQ ID NOs: 44 and 118 | SEQ ID NO: 43 |
| SEQ ID NO: 219 | SEQ ID NOs: 44 and 118 | SEQ ID NO: 43 |
| SEQ ID NO: 220 | SEQ ID NOs: 44 and 118 | SEQ ID NO: 43 |
| SEQ ID NO: 221 | SEQ ID NOs: 44 and 118 | SEQ ID NO: 43 |
| SEQ ID NO: 329 | SEQ ID NOs: 44 and 118 | SEQ ID NO: 43 |
| SEQ ID NO: 332 | SEQ ID NOs: 44 and 118 | SEQ ID NO: 43 |
| SEQ ID NO: 335 | SEQ ID NOs: 44 and 118 | SEQ ID NO: 43 |

TABLE 3
Example configurations of fusion proteins
Components (from an N-terminus to C-terminus direction)

| Mutant Soluble | | |
|---|---|---|
| ActRIIB-ECD polypeptide | Linker(s) | Heterologous Protein |
| SEQ ID NO: 119 | SEQ ID NO: 44 | SEQ ID NO: 39 |
| SEQ ID NO: 120 | SEQ ID NO: 44 | SEQ ID NO: 39 |
| SEQ ID NO: 121 | SEQ ID NO: 44 | SEQ ID NO: 39 |
| SEQ ID NO: 122 | SEQ ID NO: 44 | SEQ ID NO: 39 |
| SEQ ID NO: 123 | SEQ ID NO: 44 | SEQ ID NO: 39 |
| SEQ ID NO: 124 | SEQ ID NO: 44 | SEQ ID NO: 39 |
| SEQ ID NO: 125 | SEQ ID NO: 44 | SEQ ID NO: 39 |
| SEQ ID NO: 126 | SEQ ID NO: 44 | SEQ ID NO: 39 |
| SEQ ID NO: 127 | SEQ ID NO: 44 | SEQ ID NO: 39 |
| SEQ ID NO: 128 | SEQ ID NO: 44 | SEQ ID NO: 39 |
| SEQ ID NO: 129 | SEQ ID NO: 44 | SEQ ID NO: 39 |
| SEQ ID NO: 130 | SEQ ID NO: 44 | SEQ ID NO: 39 |
| SEQ ID NO: 131 | SEQ ID NO: 44 | SEQ ID NO: 39 |
| SEQ ID NO: 132 | SEQ ID NO: 44 | SEQ ID NO: 39 |
| SEQ ID NO: 133 | SEQ ID NO: 44 | SEQ ID NO: 39 |
| SEQ ID NO: 134 | SEQ ID NO: 44 | SEQ ID NO: 39 |
| SEQ ID NO: 135 | SEQ ID NO: 44 | SEQ ID NO: 39 |
| SEQ ID NO: 136 | SEQ ID NO: 44 | SEQ ID NO: 39 |
| SEQ ID NO: 137 | SEQ ID NO: 44 | SEQ ID NO: 39 |
| SEQ ID NO: 138 | SEQ ID NO: 44 | SEQ ID NO: 39 |
| SEQ ID NO: 139 | SEQ ID NO: 44 | SEQ ID NO: 39 |
| SEQ ID NO: 140 | SEQ ID NO: 44 | SEQ ID NO: 39 |
| SEQ ID NO: 141 | SEQ ID NO: 44 | SEQ ID NO: 39 |
| SEQ ID NO: 142 | SEQ ID NO: 44 | SEQ ID NO: 39 |
| SEQ ID NO: 143 | SEQ ID NO: 44 | SEQ ID NO: 39 |
| SEQ ID NO: 144 | SEQ ID NO: 44 | SEQ ID NO: 39 |
| SEQ ID NO: 145 | SEQ ID NO: 44 | SEQ ID NO: 39 |
| SEQ ID NO: 146 | SEQ ID NO: 44 | SEQ ID NO: 39 |
| SEQ ID NO: 147 | SEQ ID NO: 44 | SEQ ID NO: 39 |
| SEQ ID NO: 148 | SEQ ID NO: 44 | SEQ ID NO: 39 |
| SEQ ID NO: 149 | SEQ ID NO: 44 | SEQ ID NO: 39 |
| SEQ ID NO: 150 | SEQ ID NO: 44 | SEQ ID NO: 39 |
| SEQ ID NO: 151 | SEQ ID NO: 44 | SEQ ID NO: 39 |
| SEQ ID NO: 152 | SEQ ID NO: 44 | SEQ ID NO: 39 |
| SEQ ID NO: 153 | SEQ ID NO: 44 | SEQ ID NO: 39 |
| SEQ ID NO: 154 | SEQ ID NO: 44 | SEQ ID NO: 39 |
| SEQ ID NO: 155 | SEQ ID NO: 44 | SEQ ID NO: 39 |
| SEQ ID NO: 156 | SEQ ID NO: 44 | SEQ ID NO: 39 |
| SEQ ID NO: 157 | SEQ ID NO: 44 | SEQ ID NO: 39 |
| SEQ ID NO: 158 | SEQ ID NO: 44 | SEQ ID NO: 39 |
| SEQ ID NO: 159 | SEQ ID NO: 44 | SEQ ID NO: 39 |
| SEQ ID NO: 160 | SEQ ID NO: 44 | SEQ ID NO: 39 |
| SEQ ID NO: 161 | SEQ ID NO: 44 | SEQ ID NO: 39 |
| SEQ ID NO: 162 | SEQ ID NO: 44 | SEQ ID NO: 39 |
| SEQ ID NO: 163 | SEQ ID NO: 44 | SEQ ID NO: 39 |
| SEQ ID NO: 164 | SEQ ID NO: 44 | SEQ ID NO: 39 |
| SEQ ID NO: 165 | SEQ ID NO: 44 | SEQ ID NO: 39 |
| SEQ ID NO: 166 | SEQ ID NO: 44 | SEQ ID NO: 39 |
| SEQ ID NO: 167 | SEQ ID NO: 44 | SEQ ID NO: 39 |
| SEQ ID NO: 168 | SEQ ID NO: 44 | SEQ ID NO: 39 |
| SEQ ID NO: 169 | SEQ ID NO: 44 | SEQ ID NO: 39 |
| SEQ ID NO: 170 | SEQ ID NO: 44 | SEQ ID NO: 39 |
| SEQ ID NO: 171 | SEQ ID NO: 44 | SEQ ID NO: 39 |
| SEQ ID NO: 172 | SEQ ID NO: 44 | SEQ ID NO: 39 |
| SEQ ID NO: 173 | SEQ ID NO: 44 | SEQ ID NO: 39 |
| SEQ ID NO: 174 | SEQ ID NO: 44 | SEQ ID NO: 39 |
| SEQ ID NO: 175 | SEQ ID NO: 44 | SEQ ID NO: 39 |
| SEQ ID NO: 176 | SEQ ID NO: 44 | SEQ ID NO: 39 |
| SEQ ID NO: 177 | SEQ ID NO: 44 | SEQ ID NO: 39 |
| SEQ ID NO: 178 | SEQ ID NO: 44 | SEQ ID NO: 39 |
| SEQ ID NO: 179 | SEQ ID NO: 44 | SEQ ID NO: 39 |
| SEQ ID NO: 180 | SEQ ID NO: 44 | SEQ ID NO: 39 |
| SEQ ID NO: 181 | SEQ ID NO: 44 | SEQ ID NO: 39 |
| SEQ ID NO: 182 | SEQ ID NO: 44 | SEQ ID NO: 39 |
| SEQ ID NO: 183 | SEQ ID NO: 44 | SEQ ID NO: 39 |
| SEQ ID NO: 184 | SEQ ID NO: 44 | SEQ ID NO: 39 |
| SEQ ID NO: 185 | SEQ ID NO: 44 | SEQ ID NO: 39 |
| SEQ ID NO: 186 | SEQ ID NO: 44 | SEQ ID NO: 39 |
| SEQ ID NO: 187 | SEQ ID NO: 44 | SEQ ID NO: 39 |
| SEQ ID NO: 188 | SEQ ID NO: 44 | SEQ ID NO: 39 |
| SEQ ID NO: 189 | SEQ ID NO: 44 | SEQ ID NO: 39 |
| SEQ ID NO: 190 | SEQ ID NO: 44 | SEQ ID NO: 39 |
| SEQ ID NO: 191 | SEQ ID NO: 44 | SEQ ID NO: 39 |
| SEQ ID NO: 192 | SEQ ID NO: 44 | SEQ ID NO: 39 |
| SEQ ID NO: 193 | SEQ ID NO: 44 | SEQ ID NO: 39 |
| SEQ ID NO: 194 | SEQ ID NO: 44 | SEQ ID NO: 39 |
| SEQ ID NO: 195 | SEQ ID NO: 44 | SEQ ID NO: 39 |
| SEQ ID NO: 196 | SEQ ID NO: 44 | SEQ ID NO: 39 |
| SEQ ID NO: 197 | SEQ ID NO: 44 | SEQ ID NO: 39 |
| SEQ ID NO: 198 | SEQ ID NO: 44 | SEQ ID NO: 39 |
| SEQ ID NO: 199 | SEQ ID NO: 44 | SEQ ID NO: 39 |
| SEQ ID NO: 200 | SEQ ID NO: 44 | SEQ ID NO: 39 |
| SEQ ID NO: 201 | SEQ ID NO: 44 | SEQ ID NO: 39 |
| SEQ ID NO: 202 | SEQ ID NO: 44 | SEQ ID NO: 39 |
| SEQ ID NO: 203 | SEQ ID NO: 44 | SEQ ID NO: 39 |
| SEQ ID NO: 204 | SEQ ID NO: 44 | SEQ ID NO: 39 |
| SEQ ID NO: 205 | SEQ ID NO: 44 | SEQ ID NO: 39 |
| SEQ ID NO: 206 | SEQ ID NO: 44 | SEQ ID NO: 39 |
| SEQ ID NO: 207 | SEQ ID NO: 44 | SEQ ID NO: 39 |
| SEQ ID NO: 208 | SEQ ID NO: 44 | SEQ ID NO: 39 |
| SEQ ID NO: 209 | SEQ ID NO: 44 | SEQ ID NO: 39 |
| SEQ ID NO: 210 | SEQ ID NO: 44 | SEQ ID NO: 39 |
| SEQ ID NO: 211 | SEQ ID NO: 44 | SEQ ID NO: 39 |
| SEQ ID NO: 212 | SEQ ID NO: 44 | SEQ ID NO: 39 |
| SEQ ID NO: 213 | SEQ ID NO: 44 | SEQ ID NO: 39 |
| SEQ ID NO: 214 | SEQ ID NO: 44 | SEQ ID NO: 39 |
| SEQ ID NO: 215 | SEQ ID NO: 44 | SEQ ID NO: 39 |
| SEQ ID NO: 216 | SEQ ID NO: 44 | SEQ ID NO: 39 |
| SEQ ID NO: 217 | SEQ ID NO: 44 | SEQ ID NO: 39 |
| SEQ ID NO: 218 | SEQ ID NO: 44 | SEQ ID NO: 39 |
| SEQ ID NO: 219 | SEQ ID NO: 44 | SEQ ID NO: 39 |
| SEQ ID NO: 220 | SEQ ID NO: 44 | SEQ ID NO: 39 |
| SEQ ID NO: 221 | SEQ ID NO: 44 | SEQ ID NO: 39 |
| SEQ ID NO: 329 | SEQ ID NO: 44 | SEQ ID NO: 39 |
| SEQ ID NO: 332 | SEQ ID NO: 44 | SEQ ID NO: 39 |
| SEQ ID NO: 335 | SEQ ID NO: 44 | SEQ ID NO: 39 |
| SEQ ID NO: 119 | SEQ ID NO: 44 | SEQ ID NO: 41 |
| SEQ ID NO: 120 | SEQ ID NO: 44 | SEQ ID NO: 41 |
| SEQ ID NO: 121 | SEQ ID NO: 44 | SEQ ID NO: 41 |
| SEQ ID NO: 122 | SEQ ID NO: 44 | SEQ ID NO: 41 |
| SEQ ID NO: 123 | SEQ ID NO: 44 | SEQ ID NO: 41 |
| SEQ ID NO: 124 | SEQ ID NO: 44 | SEQ ID NO: 41 |
| SEQ ID NO: 125 | SEQ ID NO: 44 | SEQ ID NO: 41 |
| SEQ ID NO: 126 | SEQ ID NO: 44 | SEQ ID NO: 41 |
| SEQ ID NO: 127 | SEQ ID NO: 44 | SEQ ID NO: 41 |
| SEQ ID NO: 128 | SEQ ID NO: 44 | SEQ ID NO: 41 |
| SEQ ID NO: 129 | SEQ ID NO: 44 | SEQ ID NO: 41 |
| SEQ ID NO: 130 | SEQ ID NO: 44 | SEQ ID NO: 41 |
| SEQ ID NO: 131 | SEQ ID NO: 44 | SEQ ID NO: 41 |
| SEQ ID NO: 132 | SEQ ID NO: 44 | SEQ ID NO: 41 |
| SEQ ID NO: 133 | SEQ ID NO: 44 | SEQ ID NO: 41 |
| SEQ ID NO: 134 | SEQ ID NO: 44 | SEQ ID NO: 41 |
| SEQ ID NO: 135 | SEQ ID NO: 44 | SEQ ID NO: 41 |
| SEQ ID NO: 136 | SEQ ID NO: 44 | SEQ ID NO: 41 |
| SEQ ID NO: 137 | SEQ ID NO: 44 | SEQ ID NO: 41 |
| SEQ ID NO: 138 | SEQ ID NO: 44 | SEQ ID NO: 41 |
| SEQ ID NO: 139 | SEQ ID NO: 44 | SEQ ID NO: 41 |
| SEQ ID NO: 140 | SEQ ID NO: 44 | SEQ ID NO: 41 |
| SEQ ID NO: 141 | SEQ ID NO: 44 | SEQ ID NO: 41 |
| SEQ ID NO: 142 | SEQ ID NO: 44 | SEQ ID NO: 41 |
| SEQ ID NO: 143 | SEQ ID NO: 44 | SEQ ID NO: 41 |
| SEQ ID NO: 144 | SEQ ID NO: 44 | SEQ ID NO: 41 |
| SEQ ID NO: 145 | SEQ ID NO: 44 | SEQ ID NO: 41 |
| SEQ ID NO: 146 | SEQ ID NO: 44 | SEQ ID NO: 41 |
| SEQ ID NO: 147 | SEQ ID NO: 44 | SEQ ID NO: 41 |
| SEQ ID NO: 148 | SEQ ID NO: 44 | SEQ ID NO: 41 |
| SEQ ID NO: 149 | SEQ ID NO: 44 | SEQ ID NO: 41 |
| SEQ ID NO: 150 | SEQ ID NO: 44 | SEQ ID NO: 41 |
| SEQ ID NO: 151 | SEQ ID NO: 44 | SEQ ID NO: 41 |
| SEQ ID NO: 152 | SEQ ID NO: 44 | SEQ ID NO: 41 |
| SEQ ID NO: 153 | SEQ ID NO: 44 | SEQ ID NO: 41 |
| SEQ ID NO: 154 | SEQ ID NO: 44 | SEQ ID NO: 41 |
| SEQ ID NO: 155 | SEQ ID NO: 44 | SEQ ID NO: 41 |
| SEQ ID NO: 156 | SEQ ID NO: 44 | SEQ ID NO: 41 |
| SEQ ID NO: 157 | SEQ ID NO: 44 | SEQ ID NO: 41 |
| SEQ ID NO: 158 | SEQ ID NO: 44 | SEQ ID NO: 41 |
| SEQ ID NO: 159 | SEQ ID NO: 44 | SEQ ID NO: 41 |
| SEQ ID NO: 160 | SEQ ID NO: 44 | SEQ ID NO: 41 |
| SEQ ID NO: 161 | SEQ ID NO: 44 | SEQ ID NO: 41 |
| SEQ ID NO: 162 | SEQ ID NO: 44 | SEQ ID NO: 41 |
| SEQ ID NO: 163 | SEQ ID NO: 44 | SEQ ID NO: 41 |
| SEQ ID NO: 164 | SEQ ID NO: 44 | SEQ ID NO: 41 |
| SEQ ID NO: 165 | SEQ ID NO: 44 | SEQ ID NO: 41 |
| SEQ ID NO: 166 | SEQ ID NO: 44 | SEQ ID NO: 41 |
| SEQ ID NO: 167 | SEQ ID NO: 44 | SEQ ID NO: 41 |
| SEQ ID NO: 168 | SEQ ID NO: 44 | SEQ ID NO: 41 |
| SEQ ID NO: 169 | SEQ ID NO: 44 | SEQ ID NO: 41 |
| SEQ ID NO: 170 | SEQ ID NO: 44 | SEQ ID NO: 41 |
| SEQ ID NO: 171 | SEQ ID NO: 44 | SEQ ID NO: 41 |
| SEQ ID NO: 172 | SEQ ID NO: 44 | SEQ ID NO: 41 |
| SEQ ID NO: 173 | SEQ ID NO: 44 | SEQ ID NO: 41 |
| SEQ ID NO: 174 | SEQ ID NO: 44 | SEQ ID NO: 41 |
| SEQ ID NO: 175 | SEQ ID NO: 44 | SEQ ID NO: 41 |
| SEQ ID NO: 176 | SEQ ID NO: 44 | SEQ ID NO: 41 |
| SEQ ID NO: 177 | SEQ ID NO: 44 | SEQ ID NO: 41 |
| SEQ ID NO: 178 | SEQ ID NO: 44 | SEQ ID NO: 41 |
| SEQ ID NO: 179 | SEQ ID NO: 44 | SEQ ID NO: 41 |
| SEQ ID NO: 180 | SEQ ID NO: 44 | SEQ ID NO: 41 |
| SEQ ID NO: 181 | SEQ ID NO: 44 | SEQ ID NO: 41 |
| SEQ ID NO: 182 | SEQ ID NO: 44 | SEQ ID NO: 41 |
| SEQ ID NO: 183 | SEQ ID NO: 44 | SEQ ID NO: 41 |
| SEQ ID NO: 184 | SEQ ID NO: 44 | SEQ ID NO: 41 |
| SEQ ID NO: 185 | SEQ ID NO: 44 | SEQ ID NO: 41 |
| SEQ ID NO: 186 | SEQ ID NO: 44 | SEQ ID NO: 41 |
| SEQ ID NO: 187 | SEQ ID NO: 44 | SEQ ID NO: 41 |
| SEQ ID NO: 188 | SEQ ID NO: 44 | SEQ ID NO: 41 |
| SEQ ID NO: 189 | SEQ ID NO: 44 | SEQ ID NO: 41 |
| SEQ ID NO: 190 | SEQ ID NO: 44 | SEQ ID NO: 41 |
| SEQ ID NO: 191 | SEQ ID NO: 44 | SEQ ID NO: 41 |
| SEQ ID NO: 192 | SEQ ID NO: 44 | SEQ ID NO: 41 |
| SEQ ID NO: 193 | SEQ ID NO: 44 | SEQ ID NO: 41 |
| SEQ ID NO: 194 | SEQ ID NO: 44 | SEQ ID NO: 41 |
| SEQ ID NO: 195 | SEQ ID NO: 44 | SEQ ID NO: 41 |
| SEQ ID NO: 196 | SEQ ID NO: 44 | SEQ ID NO: 41 |
| SEQ ID NO: 197 | SEQ ID NO: 44 | SEQ ID NO: 41 |
| SEQ ID NO: 198 | SEQ ID NO: 44 | SEQ ID NO: 41 |
| SEQ ID NO: 199 | SEQ ID NO: 44 | SEQ ID NO: 41 |
| SEQ ID NO: 200 | SEQ ID NO: 44 | SEQ ID NO: 41 |
| SEQ ID NO: 201 | SEQ ID NO: 44 | SEQ ID NO: 41 |
| SEQ ID NO: 202 | SEQ ID NO: 44 | SEQ ID NO: 41 |
| SEQ ID NO: 203 | SEQ ID NO: 44 | SEQ ID NO: 41 |
| SEQ ID NO: 204 | SEQ ID NO: 44 | SEQ ID NO: 41 |
| SEQ ID NO: 205 | SEQ ID NO: 44 | SEQ ID NO: 41 |
| SEQ ID NO: 206 | SEQ ID NO: 44 | SEQ ID NO: 41 |
| SEQ ID NO: 207 | SEQ ID NO: 44 | SEQ ID NO: 41 |
| SEQ ID NO: 208 | SEQ ID NO: 44 | SEQ ID NO: 41 |
| SEQ ID NO: 209 | SEQ ID NO: 44 | SEQ ID NO: 41 |
| SEQ ID NO: 210 | SEQ ID NO: 44 | SEQ ID NO: 41 |
| SEQ ID NO: 211 | SEQ ID NO: 44 | SEQ ID NO: 41 |
| SEQ ID NO: 212 | SEQ ID NO: 44 | SEQ ID NO: 41 |
| SEQ ID NO: 213 | SEQ ID NO: 44 | SEQ ID NO: 41 |
| SEQ ID NO: 214 | SEQ ID NO: 44 | SEQ ID NO: 41 |
| SEQ ID NO: 215 | SEQ ID NO: 44 | SEQ ID NO: 41 |
| SEQ ID NO: 216 | SEQ ID NO: 44 | SEQ ID NO: 41 |
| SEQ ID NO: 217 | SEQ ID NO: 44 | SEQ ID NO: 41 |
| SEQ ID NO: 218 | SEQ ID NO: 44 | SEQ ID NO: 41 |
| SEQ ID NO: 219 | SEQ ID NO: 44 | SEQ ID NO: 41 |
| SEQ ID NO: 220 | SEQ ID NO: 44 | SEQ ID NO: 41 |
| SEQ ID NO: 221 | SEQ ID NO: 44 | SEQ ID NO: 41 |
| SEQ ID NO: 329 | SEQ ID NO: 44 | SEQ ID NO: 41 |
| SEQ ID NO: 332 | SEQ ID NO: 44 | SEQ ID NO: 41 |
| SEQ ID NO: 335 | SEQ ID NO: 44 | SEQ ID NO: 41 |
| SEQ ID NO: 119 | SEQ ID NO: 44 | SEQ ID NO: 43 |
| SEQ ID NO: 120 | SEQ ID NO: 44 | SEQ ID NO: 43 |
| SEQ ID NO: 121 | SEQ ID NO: 44 | SEQ ID NO: 43 |
| SEQ ID NO: 122 | SEQ ID NO: 44 | SEQ ID NO: 43 |
| SEQ ID NO: 123 | SEQ ID NO: 44 | SEQ ID NO: 43 |
| SEQ ID NO: 124 | SEQ ID NO: 44 | SEQ ID NO: 43 |
| SEQ ID NO: 125 | SEQ ID NO: 44 | SEQ ID NO: 43 |
| SEQ ID NO: 126 | SEQ ID NO: 44 | SEQ ID NO: 43 |
| SEQ ID NO: 127 | SEQ ID NO: 44 | SEQ ID NO: 43 |
| SEQ ID NO: 128 | SEQ ID NO: 44 | SEQ ID NO: 43 |
| SEQ ID NO: 129 | SEQ ID NO: 44 | SEQ ID NO: 43 |
| SEQ ID NO: 130 | SEQ ID NO: 44 | SEQ ID NO: 43 |
| SEQ ID NO: 131 | SEQ ID NO: 44 | SEQ ID NO: 43 |
| SEQ ID NO: 132 | SEQ ID NO: 44 | SEQ ID NO: 43 |
| SEQ ID NO: 133 | SEQ ID NO: 44 | SEQ ID NO: 43 |
| SEQ ID NO: 134 | SEQ ID NO: 44 | SEQ ID NO: 43 |
| SEQ ID NO: 135 | SEQ ID NO: 44 | SEQ ID NO: 43 |
| SEQ ID NO: 136 | SEQ ID NO: 44 | SEQ ID NO: 43 |
| SEQ ID NO: 137 | SEQ ID NO: 44 | SEQ ID NO: 43 |
| SEQ ID NO: 138 | SEQ ID NO: 44 | SEQ ID NO: 43 |
| SEQ ID NO: 139 | SEQ ID NO: 44 | SEQ ID NO: 43 |
| SEQ ID NO: 140 | SEQ ID NO: 44 | SEQ ID NO: 43 |
| SEQ ID NO: 141 | SEQ ID NO: 44 | SEQ ID NO: 43 |
| SEQ ID NO: 142 | SEQ ID NO: 44 | SEQ ID NO: 43 |
| SEQ ID NO: 143 | SEQ ID NO: 44 | SEQ ID NO: 43 |
| SEQ ID NO: 144 | SEQ ID NO: 44 | SEQ ID NO: 43 |
| SEQ ID NO: 145 | SEQ ID NO: 44 | SEQ ID NO: 43 |
| SEQ ID NO: 146 | SEQ ID NO: 44 | SEQ ID NO: 43 |
| SEQ ID NO: 147 | SEQ ID NO: 44 | SEQ ID NO: 43 |
| SEQ ID NO: 148 | SEQ ID NO: 44 | SEQ ID NO: 43 |
| SEQ ID NO: 149 | SEQ ID NO: 44 | SEQ ID NO: 43 |
| SEQ ID NO: 150 | SEQ ID NO: 44 | SEQ ID NO: 43 |
| SEQ ID NO: 151 | SEQ ID NO: 44 | SEQ ID NO: 43 |
| SEQ ID NO: 152 | SEQ ID NO: 44 | SEQ ID NO: 43 |
| SEQ ID NO: 153 | SEQ ID NO: 44 | SEQ ID NO: 43 |
| SEQ ID NO: 154 | SEQ ID NO: 44 | SEQ ID NO: 43 |
| SEQ ID NO: 155 | SEQ ID NO: 44 | SEQ ID NO: 43 |
| SEQ ID NO: 156 | SEQ ID NO: 44 | SEQ ID NO: 43 |
| SEQ ID NO: 157 | SEQ ID NO: 44 | SEQ ID NO: 43 |
| SEQ ID NO: 158 | SEQ ID NO: 44 | SEQ ID NO: 43 |
| SEQ ID NO: 159 | SEQ ID NO: 44 | SEQ ID NO: 43 |
| SEQ ID NO: 160 | SEQ ID NO: 44 | SEQ ID NO: 43 |
| SEQ ID NO: 161 | SEQ ID NO: 44 | SEQ ID NO: 43 |
| SEQ ID NO: 162 | SEQ ID NO: 44 | SEQ ID NO: 43 |
| SEQ ID NO: 163 | SEQ ID NO: 44 | SEQ ID NO: 43 |
| SEQ ID NO: 164 | SEQ ID NO: 44 | SEQ ID NO: 43 |
| SEQ ID NO: 165 | SEQ ID NO: 44 | SEQ ID NO: 43 |
| SEQ ID NO: 166 | SEQ ID NO: 44 | SEQ ID NO: 43 |
| SEQ ID NO: 167 | SEQ ID NO: 44 | SEQ ID NO: 43 |
| SEQ ID NO: 168 | SEQ ID NO: 44 | SEQ ID NO: 43 |
| SEQ ID NO: 169 | SEQ ID NO: 44 | SEQ ID NO: 43 |
| SEQ ID NO: 170 | SEQ ID NO: 44 | SEQ ID NO: 43 |
| SEQ ID NO: 171 | SEQ ID NO: 44 | SEQ ID NO: 43 |
| SEQ ID NO: 172 | SEQ ID NO: 44 | SEQ ID NO: 43 |
| SEQ ID NO: 173 | SEQ ID NO: 44 | SEQ ID NO: 43 |
| SEQ ID NO: 174 | SEQ ID NO: 44 | SEQ ID NO: 43 |
| SEQ ID NO: 175 | SEQ ID NO: 44 | SEQ ID NO: 43 |
| SEQ ID NO: 176 | SEQ ID NO: 44 | SEQ ID NO: 43 |
| SEQ ID NO: 177 | SEQ ID NO: 44 | SEQ ID NO: 43 |
| SEQ ID NO: 178 | SEQ ID NO: 44 | SEQ ID NO: 43 |
| SEQ ID NO: 179 | SEQ ID NO: 44 | SEQ ID NO: 43 |
| SEQ ID NO: 180 | SEQ ID NO: 44 | SEQ ID NO: 43 |
| SEQ ID NO: 181 | SEQ ID NO: 44 | SEQ ID NO: 43 |
| SEQ ID NO: 182 | SEQ ID NO: 44 | SEQ ID NO: 43 |
| SEQ ID NO: 183 | SEQ ID NO: 44 | SEQ ID NO: 43 |
| SEQ ID NO: 184 | SEQ ID NO: 44 | SEQ ID NO: 43 |
| SEQ ID NO: 185 | SEQ ID NO: 44 | SEQ ID NO: 43 |
| SEQ ID NO: 186 | SEQ ID NO: 44 | SEQ ID NO: 43 |
| SEQ ID NO: 187 | SEQ ID NO: 44 | SEQ ID NO: 43 |
| SEQ ID NO: 188 | SEQ ID NO: 44 | SEQ ID NO: 43 |
| SEQ ID NO: 189 | SEQ ID NO: 44 | SEQ ID NO: 43 |
| SEQ ID NO: 190 | SEQ ID NO: 44 | SEQ ID NO: 43 |
| SEQ ID NO: 191 | SEQ ID NO: 44 | SEQ ID NO: 43 |
| SEQ ID NO: 192 | SEQ ID NO: 44 | SEQ ID NO: 43 |
| SEQ ID NO: 193 | SEQ ID NO: 44 | SEQ ID NO: 43 |
| SEQ ID NO: 194 | SEQ ID NO: 44 | SEQ ID NO: 43 |
| SEQ ID NO: 195 | SEQ ID NO: 44 | SEQ ID NO: 43 |
| SEQ ID NO: 196 | SEQ ID NO: 44 | SEQ ID NO: 43 |
| SEQ ID NO: 197 | SEQ ID NO: 44 | SEQ ID NO: 43 |
| SEQ ID NO: 198 | SEQ ID NO: 44 | SEQ ID NO: 43 |
| SEQ ID NO: 199 | SEQ ID NO: 44 | SEQ ID NO: 43 |
| SEQ ID NO: 200 | SEQ ID NO: 44 | SEQ ID NO: 43 |
| SEQ ID NO: 201 | SEQ ID NO: 44 | SEQ ID NO: 43 |
| SEQ ID NO: 202 | SEQ ID NO: 44 | SEQ ID NO: 43 |
| SEQ ID NO: 203 | SEQ ID NO: 44 | SEQ ID NO: 43 |
| SEQ ID NO: 204 | SEQ ID NO: 44 | SEQ ID NO: 43 |
| SEQ ID NO: 205 | SEQ ID NO: 44 | SEQ ID NO: 43 |
| SEQ ID NO: 206 | SEQ ID NO: 44 | SEQ ID NO: 43 |
| SEQ ID NO: 207 | SEQ ID NO: 44 | SEQ ID NO: 43 |
| SEQ ID NO: 208 | SEQ ID NO: 44 | SEQ ID NO: 43 |
| SEQ ID NO: 209 | SEQ ID NO: 44 | SEQ ID NO: 43 |
| SEQ ID NO: 210 | SEQ ID NO: 44 | SEQ ID NO: 43 |
| SEQ ID NO: 211 | SEQ ID NO: 44 | SEQ ID NO: 43 |
| SEQ ID NO: 212 | SEQ ID NO: 44 | SEQ ID NO: 43 |
| SEQ ID NO: 213 | SEQ ID NO: 44 | SEQ ID NO: 43 |
| SEQ ID NO: 214 | SEQ ID NO: 44 | SEQ ID NO: 43 |
| SEQ ID NO: 215 | SEQ ID NO: 44 | SEQ ID NO: 43 |
| SEQ ID NO: 216 | SEQ ID NO: 44 | SEQ ID NO: 43 |
| SEQ ID NO: 217 | SEQ ID NO: 44 | SEQ ID NO: 43 |
| SEQ ID NO: 218 | SEQ ID NO: 44 | SEQ ID NO: 43 |
| SEQ ID NO: 219 | SEQ ID NO: 44 | SEQ ID NO: 43 |
| SEQ ID NO: 220 | SEQ ID NO: 44 | SEQ ID NO: 43 |
| SEQ ID NO: 221 | SEQ ID NO: 44 | SEQ ID NO: 43 |
| SEQ ID NO: 329 | SEQ ID NO: 44 | SEQ ID NO: 43 |
| SEQ ID NO: 332 | SEQ ID NO: 44 | SEQ ID NO: 43 |
| SEQ ID NO: 335 | SEQ ID NO: 44 | SEQ ID NO: 43 |

TABLE 4
Example configurations of fusion proteins
Components (from an N-terminus to C-terminus direction)

| Mutant Soluble | | |
|---|---|---|
| ActRIIB-ECD polypeptide | Linker(s) | Heterologous Protein |
| SEQ ID NO: 119 | SEQ ID NO: 118 | SEQ ID NO: 39 |
| SEQ ID NO: 120 | SEQ ID NO: 118 | SEQ ID NO: 39 |
| SEQ ID NO: 121 | SEQ ID NO: 118 | SEQ ID NO: 39 |
| SEQ ID NO: 122 | SEQ ID NO: 118 | SEQ ID NO: 39 |
| SEQ ID NO: 123 | SEQ ID NO: 118 | SEQ ID NO: 39 |
| SEQ ID NO: 124 | SEQ ID NO: 118 | SEQ ID NO: 39 |
| SEQ ID NO: 125 | SEQ ID NO: 118 | SEQ ID NO: 39 |
| SEQ ID NO: 126 | SEQ ID NO: 118 | SEQ ID NO: 39 |
| SEQ ID NO: 127 | SEQ ID NO: 118 | SEQ ID NO: 39 |
| SEQ ID NO: 128 | SEQ ID NO: 118 | SEQ ID NO: 39 |
| SEQ ID NO: 129 | SEQ ID NO: 118 | SEQ ID NO: 39 |
| SEQ ID NO: 130 | SEQ ID NO: 118 | SEQ ID NO: 39 |
| SEQ ID NO: 131 | SEQ ID NO: 118 | SEQ ID NO: 39 |
| SEQ ID NO: 132 | SEQ ID NO: 118 | SEQ ID NO: 39 |
| SEQ ID NO: 133 | SEQ ID NO: 118 | SEQ ID NO: 39 |
| SEQ ID NO: 134 | SEQ ID NO: 118 | SEQ ID NO: 39 |
| SEQ ID NO: 135 | SEQ ID NO: 118 | SEQ ID NO: 39 |
| SEQ ID NO: 136 | SEQ ID NO: 118 | SEQ ID NO: 39 |
| SEQ ID NO: 137 | SEQ ID NO: 118 | SEQ ID NO: 39 |
| SEQ ID NO: 138 | SEQ ID NO: 118 | SEQ ID NO: 39 |
| SEQ ID NO: 139 | SEQ ID NO: 118 | SEQ ID NO: 39 |
| SEQ ID NO: 140 | SEQ ID NO: 118 | SEQ ID NO: 39 |
| SEQ ID NO: 141 | SEQ ID NO: 118 | SEQ ID NO: 39 |
| SEQ ID NO: 142 | SEQ ID NO: 118 | SEQ ID NO: 39 |
| SEQ ID NO: 143 | SEQ ID NO: 118 | SEQ ID NO: 39 |
| SEQ ID NO: 144 | SEQ ID NO: 118 | SEQ ID NO: 39 |
| SEQ ID NO: 145 | SEQ ID NO: 118 | SEQ ID NO: 39 |
| SEQ ID NO: 146 | SEQ ID NO: 118 | SEQ ID NO: 39 |
| SEQ ID NO: 147 | SEQ ID NO: 118 | SEQ ID NO: 39 |
| SEQ ID NO: 148 | SEQ ID NO: 118 | SEQ ID NO: 39 |
| SEQ ID NO: 149 | SEQ ID NO: 118 | SEQ ID NO: 39 |
| SEQ ID NO: 150 | SEQ ID NO: 118 | SEQ ID NO: 39 |
| SEQ ID NO: 151 | SEQ ID NO: 118 | SEQ ID NO: 39 |
| SEQ ID NO: 152 | SEQ ID NO: 118 | SEQ ID NO: 39 |
| SEQ ID NO: 153 | SEQ ID NO: 118 | SEQ ID NO: 39 |
| SEQ ID NO: 154 | SEQ ID NO: 118 | SEQ ID NO: 39 |
| SEQ ID NO: 155 | SEQ ID NO: 118 | SEQ ID NO: 39 |
| SEQ ID NO: 156 | SEQ ID NO: 118 | SEQ ID NO: 39 |
| SEQ ID NO: 157 | SEQ ID NO: 118 | SEQ ID NO: 39 |
| SEQ ID NO: 158 | SEQ ID NO: 118 | SEQ ID NO: 39 |
| SEQ ID NO: 159 | SEQ ID NO: 118 | SEQ ID NO: 39 |
| SEQ ID NO: 160 | SEQ ID NO: 118 | SEQ ID NO: 39 |
| SEQ ID NO: 161 | SEQ ID NO: 118 | SEQ ID NO: 39 |
| SEQ ID NO: 162 | SEQ ID NO: 118 | SEQ ID NO: 39 |
| SEQ ID NO: 163 | SEQ ID NO: 118 | SEQ ID NO: 39 |
| SEQ ID NO: 164 | SEQ ID NO: 118 | SEQ ID NO: 39 |
| SEQ ID NO: 165 | SEQ ID NO: 118 | SEQ ID NO: 39 |
| SEQ ID NO: 166 | SEQ ID NO: 118 | SEQ ID NO: 39 |
| SEQ ID NO: 167 | SEQ ID NO: 118 | SEQ ID NO: 39 |
| SEQ ID NO: 168 | SEQ ID NO: 118 | SEQ ID NO: 39 |
| SEQ ID NO: 169 | SEQ ID NO: 118 | SEQ ID NO: 39 |
| SEQ ID NO: 170 | SEQ ID NO: 118 | SEQ ID NO: 39 |
| SEQ ID NO: 171 | SEQ ID NO: 118 | SEQ ID NO: 39 |
| SEQ ID NO: 172 | SEQ ID NO: 118 | SEQ ID NO: 39 |
| SEQ ID NO: 173 | SEQ ID NO: 118 | SEQ ID NO: 39 |
| SEQ ID NO: 174 | SEQ ID NO: 118 | SEQ ID NO: 39 |
| SEQ ID NO: 175 | SEQ ID NO: 118 | SEQ ID NO: 39 |
| SEQ ID NO: 176 | SEQ ID NO: 118 | SEQ ID NO: 39 |
| SEQ ID NO: 177 | SEQ ID NO: 118 | SEQ ID NO: 39 |
| SEQ ID NO: 178 | SEQ ID NO: 118 | SEQ ID NO: 39 |
| SEQ ID NO: 179 | SEQ ID NO: 118 | SEQ ID NO: 39 |
| SEQ ID NO: 180 | SEQ ID NO: 118 | SEQ ID NO: 39 |
| SEQ ID NO: 181 | SEQ ID NO: 118 | SEQ ID NO: 39 |
| SEQ ID NO: 182 | SEQ ID NO: 118 | SEQ ID NO: 39 |
| SEQ ID NO: 183 | SEQ ID NO: 118 | SEQ ID NO: 39 |
| SEQ ID NO: 184 | SEQ ID NO: 118 | SEQ ID NO: 39 |
| SEQ ID NO: 185 | SEQ ID NO: 118 | SEQ ID NO: 39 |
| SEQ ID NO: 186 | SEQ ID NO: 118 | SEQ ID NO: 39 |
| SEQ ID NO: 187 | SEQ ID NO: 118 | SEQ ID NO: 39 |
| SEQ ID NO: 188 | SEQ ID NO: 118 | SEQ ID NO: 39 |
| SEQ ID NO: 189 | SEQ ID NO: 118 | SEQ ID NO: 39 |
| SEQ ID NO: 190 | SEQ ID NO: 118 | SEQ ID NO: 39 |
| SEQ ID NO: 191 | SEQ ID NO: 118 | SEQ ID NO: 39 |
| SEQ ID NO: 192 | SEQ ID NO: 118 | SEQ ID NO: 39 |
| SEQ ID NO: 193 | SEQ ID NO: 118 | SEQ ID NO: 39 |
| SEQ ID NO: 194 | SEQ ID NO: 118 | SEQ ID NO: 39 |
| SEQ ID NO: 195 | SEQ ID NO: 118 | SEQ ID NO: 39 |
| SEQ ID NO: 196 | SEQ ID NO: 118 | SEQ ID NO: 39 |
| SEQ ID NO: 197 | SEQ ID NO: 118 | SEQ ID NO: 39 |
| SEQ ID NO: 198 | SEQ ID NO: 118 | SEQ ID NO: 39 |
| SEQ ID NO: 199 | SEQ ID NO: 118 | SEQ ID NO: 39 |
| SEQ ID NO: 200 | SEQ ID NO: 118 | SEQ ID NO: 39 |
| SEQ ID NO: 201 | SEQ ID NO: 118 | SEQ ID NO: 39 |
| SEQ ID NO: 202 | SEQ ID NO: 118 | SEQ ID NO: 39 |
| SEQ ID NO: 203 | SEQ ID NO: 118 | SEQ ID NO: 39 |
| SEQ ID NO: 204 | SEQ ID NO: 118 | SEQ ID NO: 39 |
| SEQ ID NO: 205 | SEQ ID NO: 118 | SEQ ID NO: 39 |
| SEQ ID NO: 206 | SEQ ID NO: 118 | SEQ ID NO: 39 |
| SEQ ID NO: 207 | SEQ ID NO: 118 | SEQ ID NO: 39 |
| SEQ ID NO: 208 | SEQ ID NO: 118 | SEQ ID NO: 39 |
| SEQ ID NO: 209 | SEQ ID NO: 118 | SEQ ID NO: 39 |
| SEQ ID NO: 210 | SEQ ID NO: 118 | SEQ ID NO: 39 |
| SEQ ID NO: 211 | SEQ ID NO: 118 | SEQ ID NO: 39 |
| SEQ ID NO: 212 | SEQ ID NO: 118 | SEQ ID NO: 39 |
| SEQ ID NO: 213 | SEQ ID NO: 118 | SEQ ID NO: 39 |
| SEQ ID NO: 214 | SEQ ID NO: 118 | SEQ ID NO: 39 |
| SEQ ID NO: 215 | SEQ ID NO: 118 | SEQ ID NO: 39 |
| SEQ ID NO: 216 | SEQ ID NO: 118 | SEQ ID NO: 39 |
| SEQ ID NO: 217 | SEQ ID NO: 118 | SEQ ID NO: 39 |
| SEQ ID NO: 218 | SEQ ID NO: 118 | SEQ ID NO: 39 |
| SEQ ID NO: 219 | SEQ ID NO: 118 | SEQ ID NO: 39 |
| SEQ ID NO: 220 | SEQ ID NO: 118 | SEQ ID NO: 39 |
| SEQ ID NO: 221 | SEQ ID NO: 118 | SEQ ID NO: 39 |
| SEQ ID NO: 329 | SEQ ID NO: 118 | SEQ ID NO: 39 |
| SEQ ID NO: 332 | SEQ ID NO: 118 | SEQ ID NO: 39 |
| SEQ ID NO: 335 | SEQ ID NO: 118 | SEQ ID NO: 39 |
| SEQ ID NO: 119 | SEQ ID NO: 118 | SEQ ID NO: 41 |
| SEQ ID NO: 120 | SEQ ID NO: 118 | SEQ ID NO: 41 |
| SEQ ID NO: 121 | SEQ ID NO: 118 | SEQ ID NO: 41 |
| SEQ ID NO: 122 | SEQ ID NO: 118 | SEQ ID NO: 41 |
| SEQ ID NO: 123 | SEQ ID NO: 118 | SEQ ID NO: 41 |
| SEQ ID NO: 124 | SEQ ID NO: 118 | SEQ ID NO: 41 |
| SEQ ID NO: 125 | SEQ ID NO: 118 | SEQ ID NO: 41 |
| SEQ ID NO: 126 | SEQ ID NO: 118 | SEQ ID NO: 41 |
| SEQ ID NO: 127 | SEQ ID NO: 118 | SEQ ID NO: 41 |
| SEQ ID NO: 128 | SEQ ID NO: 118 | SEQ ID NO: 41 |
| SEQ ID NO: 129 | SEQ ID NO: 118 | SEQ ID NO: 41 |
| SEQ ID NO: 130 | SEQ ID NO: 118 | SEQ ID NO: 41 |
| SEQ ID NO: 131 | SEQ ID NO: 118 | SEQ ID NO: 41 |
| SEQ ID NO: 132 | SEQ ID NO: 118 | SEQ ID NO: 41 |
| SEQ ID NO: 133 | SEQ ID NO: 118 | SEQ ID NO: 41 |
| SEQ ID NO: 134 | SEQ ID NO: 118 | SEQ ID NO: 41 |
| SEQ ID NO: 135 | SEQ ID NO: 118 | SEQ ID NO: 41 |
| SEQ ID NO: 136 | SEQ ID NO: 118 | SEQ ID NO: 41 |
| SEQ ID NO: 137 | SEQ ID NO: 118 | SEQ ID NO: 41 |
| SEQ ID NO: 138 | SEQ ID NO: 118 | SEQ ID NO: 41 |
| SEQ ID NO: 139 | SEQ ID NO: 118 | SEQ ID NO: 41 |
| SEQ ID NO: 140 | SEQ ID NO: 118 | SEQ ID NO: 41 |
| SEQ ID NO: 141 | SEQ ID NO: 118 | SEQ ID NO: 41 |
| SEQ ID NO: 142 | SEQ ID NO: 118 | SEQ ID NO: 41 |
| SEQ ID NO: 143 | SEQ ID NO: 118 | SEQ ID NO: 41 |
| SEQ ID NO: 144 | SEQ ID NO: 118 | SEQ ID NO: 41 |
| SEQ ID NO: 145 | SEQ ID NO: 118 | SEQ ID NO: 41 |
| SEQ ID NO: 146 | SEQ ID NO: 118 | SEQ ID NO: 41 |
| SEQ ID NO: 147 | SEQ ID NO: 118 | SEQ ID NO: 41 |
| SEQ ID NO: 148 | SEQ ID NO: 118 | SEQ ID NO: 41 |
| SEQ ID NO: 149 | SEQ ID NO: 118 | SEQ ID NO: 41 |
| SEQ ID NO: 150 | SEQ ID NO: 118 | SEQ ID NO: 41 |
| SEQ ID NO: 151 | SEQ ID NO: 118 | SEQ ID NO: 41 |
| SEQ ID NO: 152 | SEQ ID NO: 118 | SEQ ID NO: 41 |
| SEQ ID NO: 153 | SEQ ID NO: 118 | SEQ ID NO: 41 |
| SEQ ID NO: 154 | SEQ ID NO: 118 | SEQ ID NO: 41 |
| SEQ ID NO: 155 | SEQ ID NO: 118 | SEQ ID NO: 41 |
| SEQ ID NO: 156 | SEQ ID NO: 118 | SEQ ID NO: 41 |
| SEQ ID NO: 157 | SEQ ID NO: 118 | SEQ ID NO: 41 |
| SEQ ID NO: 158 | SEQ ID NO: 118 | SEQ ID NO: 41 |
| SEQ ID NO: 159 | SEQ ID NO: 118 | SEQ ID NO: 41 |
| SEQ ID NO: 160 | SEQ ID NO: 118 | SEQ ID NO: 41 |
| SEQ ID NO: 161 | SEQ ID NO: 118 | SEQ ID NO: 41 |
| SEQ ID NO: 162 | SEQ ID NO: 118 | SEQ ID NO: 41 |
| SEQ ID NO: 163 | SEQ ID NO: 118 | SEQ ID NO: 41 |
| SEQ ID NO: 164 | SEQ ID NO: 118 | SEQ ID NO: 41 |
| SEQ ID NO: 165 | SEQ ID NO: 118 | SEQ ID NO: 41 |
| SEQ ID NO: 166 | SEQ ID NO: 118 | SEQ ID NO: 41 |
| SEQ ID NO: 167 | SEQ ID NO: 118 | SEQ ID NO: 41 |
| SEQ ID NO: 168 | SEQ ID NO: 118 | SEQ ID NO: 41 |
| SEQ ID NO: 169 | SEQ ID NO: 118 | SEQ ID NO: 41 |
| SEQ ID NO: 170 | SEQ ID NO: 118 | SEQ ID NO: 41 |
| SEQ ID NO: 171 | SEQ ID NO: 118 | SEQ ID NO: 41 |
| SEQ ID NO: 172 | SEQ ID NO: 118 | SEQ ID NO: 41 |
| SEQ ID NO: 173 | SEQ ID NO: 118 | SEQ ID NO: 41 |
| SEQ ID NO: 174 | SEQ ID NO: 118 | SEQ ID NO: 41 |
| SEQ ID NO: 175 | SEQ ID NO: 118 | SEQ ID NO: 41 |
| SEQ ID NO: 176 | SEQ ID NO: 118 | SEQ ID NO: 41 |
| SEQ ID NO: 177 | SEQ ID NO: 118 | SEQ ID NO: 41 |
| SEQ ID NO: 178 | SEQ ID NO: 118 | SEQ ID NO: 41 |
| SEQ ID NO: 179 | SEQ ID NO: 118 | SEQ ID NO: 41 |
| SEQ ID NO: 180 | SEQ ID NO: 118 | SEQ ID NO: 41 |
| SEQ ID NO: 181 | SEQ ID NO: 118 | SEQ ID NO: 41 |
| SEQ ID NO: 182 | SEQ ID NO: 118 | SEQ ID NO: 41 |
| SEQ ID NO: 183 | SEQ ID NO: 118 | SEQ ID NO: 41 |
| SEQ ID NO: 184 | SEQ ID NO: 118 | SEQ ID NO: 41 |
| SEQ ID NO: 185 | SEQ ID NO: 118 | SEQ ID NO: 41 |
| SEQ ID NO: 186 | SEQ ID NO: 118 | SEQ ID NO: 41 |
| SEQ ID NO: 187 | SEQ ID NO: 118 | SEQ ID NO: 41 |
| SEQ ID NO: 188 | SEQ ID NO: 118 | SEQ ID NO: 41 |
| SEQ ID NO: 189 | SEQ ID NO: 118 | SEQ ID NO: 41 |
| SEQ ID NO: 190 | SEQ ID NO: 118 | SEQ ID NO: 41 |
| SEQ ID NO: 191 | SEQ ID NO: 118 | SEQ ID NO: 41 |
| SEQ ID NO: 192 | SEQ ID NO: 118 | SEQ ID NO: 41 |
| SEQ ID NO: 193 | SEQ ID NO: 118 | SEQ ID NO: 41 |
| SEQ ID NO: 194 | SEQ ID NO: 118 | SEQ ID NO: 41 |
| SEQ ID NO: 195 | SEQ ID NO: 118 | SEQ ID NO: 41 |
| SEQ ID NO: 196 | SEQ ID NO: 118 | SEQ ID NO: 41 |
| SEQ ID NO: 197 | SEQ ID NO: 118 | SEQ ID NO: 41 |
| SEQ ID NO: 198 | SEQ ID NO: 118 | SEQ ID NO: 41 |
| SEQ ID NO: 199 | SEQ ID NO: 118 | SEQ ID NO: 41 |
| SEQ ID NO: 200 | SEQ ID NO: 118 | SEQ ID NO: 41 |
| SEQ ID NO: 201 | SEQ ID NO: 118 | SEQ ID NO: 41 |
| SEQ ID NO: 202 | SEQ ID NO: 118 | SEQ ID NO: 41 |
| SEQ ID NO: 203 | SEQ ID NO: 118 | SEQ ID NO: 41 |
| SEQ ID NO: 204 | SEQ ID NO: 118 | SEQ ID NO: 41 |
| SEQ ID NO: 205 | SEQ ID NO: 118 | SEQ ID NO: 41 |
| SEQ ID NO: 206 | SEQ ID NO: 118 | SEQ ID NO: 41 |
| SEQ ID NO: 207 | SEQ ID NO: 118 | SEQ ID NO: 41 |
| SEQ ID NO: 208 | SEQ ID NO: 118 | SEQ ID NO: 41 |
| SEQ ID NO: 209 | SEQ ID NO: 118 | SEQ ID NO: 41 |
| SEQ ID NO: 210 | SEQ ID NO: 118 | SEQ ID NO: 41 |
| SEQ ID NO: 211 | SEQ ID NO: 118 | SEQ ID NO: 41 |
| SEQ ID NO: 212 | SEQ ID NO: 118 | SEQ ID NO: 41 |
| SEQ ID NO: 213 | SEQ ID NO: 118 | SEQ ID NO: 41 |
| SEQ ID NO: 214 | SEQ ID NO: 118 | SEQ ID NO: 41 |
| SEQ ID NO: 215 | SEQ ID NO: 118 | SEQ ID NO: 41 |
| SEQ ID NO: 216 | SEQ ID NO: 118 | SEQ ID NO: 41 |
| SEQ ID NO: 217 | SEQ ID NO: 118 | SEQ ID NO: 41 |
| SEQ ID NO: 218 | SEQ ID NO: 118 | SEQ ID NO: 41 |
| SEQ ID NO: 219 | SEQ ID NO: 118 | SEQ ID NO: 41 |
| SEQ ID NO: 220 | SEQ ID NO: 118 | SEQ ID NO: 41 |
| SEQ ID NO: 221 | SEQ ID NO: 118 | SEQ ID NO: 41 |
| SEQ ID NO: 329 | SEQ ID NO: 118 | SEQ ID NO: 41 |
| SEQ ID NO: 332 | SEQ ID NO: 118 | SEQ ID NO: 41 |
| SEQ ID NO: 335 | SEQ ID NO: 118 | SEQ ID NO: 41 |
| SEQ ID NO: 119 | SEQ ID NO: 118 | SEQ ID NO: 43 |
| SEQ ID NO: 120 | SEQ ID NO: 118 | SEQ ID NO: 43 |
| SEQ ID NO: 121 | SEQ ID NO: 118 | SEQ ID NO: 43 |
| SEQ ID NO: 122 | SEQ ID NO: 118 | SEQ ID NO: 43 |
| SEQ ID NO: 123 | SEQ ID NO: 118 | SEQ ID NO: 43 |
| SEQ ID NO: 124 | SEQ ID NO: 118 | SEQ ID NO: 43 |
| SEQ ID NO: 125 | SEQ ID NO: 118 | SEQ ID NO: 43 |
| SEQ ID NO: 126 | SEQ ID NO: 118 | SEQ ID NO: 43 |
| SEQ ID NO: 127 | SEQ ID NO: 118 | SEQ ID NO: 43 |
| SEQ ID NO: 128 | SEQ ID NO: 118 | SEQ ID NO: 43 |
| SEQ ID NO: 129 | SEQ ID NO: 118 | SEQ ID NO: 43 |
| SEQ ID NO: 130 | SEQ ID NO: 118 | SEQ ID NO: 43 |
| SEQ ID NO: 131 | SEQ ID NO: 118 | SEQ ID NO: 43 |
| SEQ ID NO: 132 | SEQ ID NO: 118 | SEQ ID NO: 43 |
| SEQ ID NO: 133 | SEQ ID NO: 118 | SEQ ID NO: 43 |
| SEQ ID NO: 134 | SEQ ID NO: 118 | SEQ ID NO: 43 |
| SEQ ID NO: 135 | SEQ ID NO: 118 | SEQ ID NO: 43 |
| SEQ ID NO: 136 | SEQ ID NO: 118 | SEQ ID NO: 43 |
| SEQ ID NO: 137 | SEQ ID NO: 118 | SEQ ID NO: 43 |
| SEQ ID NO: 138 | SEQ ID NO: 118 | SEQ ID NO: 43 |
| SEQ ID NO: 139 | SEQ ID NO: 118 | SEQ ID NO: 43 |
| SEQ ID NO: 140 | SEQ ID NO: 118 | SEQ ID NO: 43 |
| SEQ ID NO: 141 | SEQ ID NO: 118 | SEQ ID NO: 43 |
| SEQ ID NO: 142 | SEQ ID NO: 118 | SEQ ID NO: 43 |
| SEQ ID NO: 143 | SEQ ID NO: 118 | SEQ ID NO: 43 |
| SEQ ID NO: 144 | SEQ ID NO: 118 | SEQ ID NO: 43 |
| SEQ ID NO: 145 | SEQ ID NO: 118 | SEQ ID NO: 43 |
| SEQ ID NO: 146 | SEQ ID NO: 118 | SEQ ID NO: 43 |
| SEQ ID NO: 147 | SEQ ID NO: 118 | SEQ ID NO: 43 |
| SEQ ID NO: 148 | SEQ ID NO: 118 | SEQ ID NO: 43 |
| SEQ ID NO: 149 | SEQ ID NO: 118 | SEQ ID NO: 43 |
| SEQ ID NO: 150 | SEQ ID NO: 118 | SEQ ID NO: 43 |
| SEQ ID NO: 151 | SEQ ID NO: 118 | SEQ ID NO: 43 |
| SEQ ID NO: 152 | SEQ ID NO: 118 | SEQ ID NO: 43 |
| SEQ ID NO: 153 | SEQ ID NO: 118 | SEQ ID NO: 43 |
| SEQ ID NO: 154 | SEQ ID NO: 118 | SEQ ID NO: 43 |
| SEQ ID NO: 155 | SEQ ID NO: 118 | SEQ ID NO: 43 |
| SEQ ID NO: 156 | SEQ ID NO: 118 | SEQ ID NO: 43 |
| SEQ ID NO: 157 | SEQ ID NO: 118 | SEQ ID NO: 43 |
| SEQ ID NO: 158 | SEQ ID NO: 118 | SEQ ID NO: 43 |
| SEQ ID NO: 159 | SEQ ID NO: 118 | SEQ ID NO: 43 |
| SEQ ID NO: 160 | SEQ ID NO: 118 | SEQ ID NO: 43 |
| SEQ ID NO: 161 | SEQ ID NO: 118 | SEQ ID NO: 43 |
| SEQ ID NO: 162 | SEQ ID NO: 118 | SEQ ID NO: 43 |
| SEQ ID NO: 163 | SEQ ID NO: 118 | SEQ ID NO: 43 |
| SEQ ID NO: 164 | SEQ ID NO: 118 | SEQ ID NO: 43 |
| SEQ ID NO: 165 | SEQ ID NO: 118 | SEQ ID NO: 43 |
| SEQ ID NO: 166 | SEQ ID NO: 118 | SEQ ID NO: 43 |
| SEQ ID NO: 167 | SEQ ID NO: 118 | SEQ ID NO: 43 |
| SEQ ID NO: 168 | SEQ ID NO: 118 | SEQ ID NO: 43 |
| SEQ ID NO: 169 | SEQ ID NO: 118 | SEQ ID NO: 43 |
| SEQ ID NO: 170 | SEQ ID NO: 118 | SEQ ID NO: 43 |
| SEQ ID NO: 171 | SEQ ID NO: 118 | SEQ ID NO: 43 |
| SEQ ID NO: 172 | SEQ ID NO: 118 | SEQ ID NO: 43 |
| SEQ ID NO: 173 | SEQ ID NO: 118 | SEQ ID NO: 43 |
| SEQ ID NO: 174 | SEQ ID NO: 118 | SEQ ID NO: 43 |
| SEQ ID NO: 175 | SEQ ID NO: 118 | SEQ ID NO: 43 |
| SEQ ID NO: 176 | SEQ ID NO: 118 | SEQ ID NO: 43 |
| SEQ ID NO: 177 | SEQ ID NO: 118 | SEQ ID NO: 43 |
| SEQ ID NO: 178 | SEQ ID NO: 118 | SEQ ID NO: 43 |
| SEQ ID NO: 179 | SEQ ID NO: 118 | SEQ ID NO: 43 |
| SEQ ID NO: 180 | SEQ ID NO: 118 | SEQ ID NO: 43 |
| SEQ ID NO: 181 | SEQ ID NO: 118 | SEQ ID NO: 43 |
| SEQ ID NO: 182 | SEQ ID NO: 118 | SEQ ID NO: 43 |
| SEQ ID NO: 183 | SEQ ID NO: 118 | SEQ ID NO: 43 |
| SEQ ID NO: 184 | SEQ ID NO: 118 | SEQ ID NO: 43 |
| SEQ ID NO: 185 | SEQ ID NO: 118 | SEQ ID NO: 43 |
| SEQ ID NO: 186 | SEQ ID NO: 118 | SEQ ID NO: 43 |
| SEQ ID NO: 187 | SEQ ID NO: 118 | SEQ ID NO: 43 |
| SEQ ID NO: 188 | SEQ ID NO: 118 | SEQ ID NO: 43 |
| SEQ ID NO: 189 | SEQ ID NO: 118 | SEQ ID NO: 43 |
| SEQ ID NO: 190 | SEQ ID NO: 118 | SEQ ID NO: 43 |
| SEQ ID NO: 191 | SEQ ID NO: 118 | SEQ ID NO: 43 |
| SEQ ID NO: 192 | SEQ ID NO: 118 | SEQ ID NO: 43 |
| SEQ ID NO: 193 | SEQ ID NO: 118 | SEQ ID NO: 43 |
| SEQ ID NO: 194 | SEQ ID NO: 118 | SEQ ID NO: 43 |
| SEQ ID NO: 195 | SEQ ID NO: 118 | SEQ ID NO: 43 |
| SEQ ID NO: 196 | SEQ ID NO: 118 | SEQ ID NO: 43 |
| SEQ ID NO: 197 | SEQ ID NO: 118 | SEQ ID NO: 43 |
| SEQ ID NO: 198 | SEQ ID NO: 118 | SEQ ID NO: 43 |
| SEQ ID NO: 199 | SEQ ID NO: 118 | SEQ ID NO: 43 |
| SEQ ID NO: 200 | SEQ ID NO: 118 | SEQ ID NO: 43 |
| SEQ ID NO: 201 | SEQ ID NO: 118 | SEQ ID NO: 43 |
| SEQ ID NO: 202 | SEQ ID NO: 118 | SEQ ID NO: 43 |
| SEQ ID NO: 203 | SEQ ID NO: 118 | SEQ ID NO: 43 |
| SEQ ID NO: 204 | SEQ ID NO: 118 | SEQ ID NO: 43 |
| SEQ ID NO: 205 | SEQ ID NO: 118 | SEQ ID NO: 43 |
| SEQ ID NO: 206 | SEQ ID NO: 118 | SEQ ID NO: 43 |
| SEQ ID NO: 207 | SEQ ID NO: 118 | SEQ ID NO: 43 |
| SEQ ID NO: 208 | SEQ ID NO: 118 | SEQ ID NO: 43 |
| SEQ ID NO: 209 | SEQ ID NO: 118 | SEQ ID NO: 43 |
| SEQ ID NO: 210 | SEQ ID NO: 118 | SEQ ID NO: 43 |
| SEQ ID NO: 211 | SEQ ID NO: 118 | SEQ ID NO: 43 |
| SEQ ID NO: 212 | SEQ ID NO: 118 | SEQ ID NO: 43 |
| SEQ ID NO: 213 | SEQ ID NO: 118 | SEQ ID NO: 43 |
| SEQ ID NO: 214 | SEQ ID NO: 118 | SEQ ID NO: 43 |
| SEQ ID NO: 215 | SEQ ID NO: 118 | SEQ ID NO: 43 |
| SEQ ID NO: 216 | SEQ ID NO: 118 | SEQ ID NO: 43 |
| SEQ ID NO: 217 | SEQ ID NO: 118 | SEQ ID NO: 43 |
| SEQ ID NO: 218 | SEQ ID NO: 118 | SEQ ID NO: 43 |
| SEQ ID NO: 219 | SEQ ID NO: 118 | SEQ ID NO: 43 |
| SEQ ID NO: 220 | SEQ ID NO: 118 | SEQ ID NO: 43 |
| SEQ ID NO: 221 | SEQ ID NO: 118 | SEQ ID NO: 43 |
| SEQ ID NO: 329 | SEQ ID NO: 118 | SEQ ID NO: 43 |
| SEQ ID NO: 332 | SEQ ID NO: 118 | SEQ ID NO: 43 |
| SEQ ID NO: 335 | SEQ ID NO: 118 | SEQ ID NO: 43 |

TABLE 5
Example configurations of fusion proteins
Components (from an N-terminus to C-terminus direction)

| Heterologous | | Mutant Soluble |
|---|---|---|
| Protein | Linker(s) | ActRIIB-ECD polypeptide |
| SEQ ID NO: 39 | SEQ ID NOs: 118 and 44 | SEQ ID NO: 119 |
| SEQ ID NO: 39 | SEQ ID NOs: 118 and 44 | SEQ ID NO: 120 |
| SEQ ID NO: 39 | SEQ ID NOs: 118 and 44 | SEQ ID NO: 121 |
| SEQ ID NO: 39 | SEQ ID NOs: 118 and 44 | SEQ ID NO: 122 |
| SEQ ID NO: 39 | SEQ ID NOs: 118 and 44 | SEQ ID NO: 123 |
| SEQ ID NO: 39 | SEQ ID NOs: 118 and 44 | SEQ ID NO: 124 |
| SEQ ID NO: 39 | SEQ ID NOs: 118 and 44 | SEQ ID NO: 125 |
| SEQ ID NO: 39 | SEQ ID NOs: 118 and 44 | SEQ ID NO: 126 |
| SEQ ID NO: 39 | SEQ ID NOs: 118 and 44 | SEQ ID NO: 127 |
| SEQ ID NO: 39 | SEQ ID NOs: 118 and 44 | SEQ ID NO: 128 |
| SEQ ID NO: 39 | SEQ ID NOs: 118 and 44 | SEQ ID NO: 129 |
| SEQ ID NO: 39 | SEQ ID NOs: 118 and 44 | SEQ ID NO: 130 |
| SEQ ID NO: 39 | SEQ ID NOs: 118 and 44 | SEQ ID NO: 131 |
| SEQ ID NO: 39 | SEQ ID NOs: 118 and 44 | SEQ ID NO: 132 |
| SEQ ID NO: 39 | SEQ ID NOs: 118 and 44 | SEQ ID NO: 133 |
| SEQ ID NO: 39 | SEQ ID NOs: 118 and 44 | SEQ ID NO: 134 |
| SEQ ID NO: 39 | SEQ ID NOs: 118 and 44 | SEQ ID NO: 135 |
| SEQ ID NO: 39 | SEQ ID NOs: 118 and 44 | SEQ ID NO: 136 |
| SEQ ID NO: 39 | SEQ ID NOs: 118 and 44 | SEQ ID NO: 137 |
| SEQ ID NO: 39 | SEQ ID NOs: 118 and 44 | SEQ ID NO: 138 |
| SEQ ID NO: 39 | SEQ ID NOs: 118 and 44 | SEQ ID NO: 139 |
| SEQ ID NO: 39 | SEQ ID NOs: 118 and 44 | SEQ ID NO: 140 |
| SEQ ID NO: 39 | SEQ ID NOs: 118 and 44 | SEQ ID NO: 141 |
| SEQ ID NO: 39 | SEQ ID NOs: 118 and 44 | SEQ ID NO: 142 |
| SEQ ID NO: 39 | SEQ ID NOs: 118 and 44 | SEQ ID NO: 143 |
| SEQ ID NO: 39 | SEQ ID NOs: 118 and 44 | SEQ ID NO: 144 |
| SEQ ID NO: 39 | SEQ ID NOs: 118 and 44 | SEQ ID NO: 145 |
| SEQ ID NO: 39 | SEQ ID NOs: 118 and 44 | SEQ ID NO: 146 |
| SEQ ID NO: 39 | SEQ ID NOs: 118 and 44 | SEQ ID NO: 147 |
| SEQ ID NO: 39 | SEQ ID NOs: 118 and 44 | SEQ ID NO: 148 |
| SEQ ID NO: 39 | SEQ ID NOs: 118 and 44 | SEQ ID NO: 149 |
| SEQ ID NO: 39 | SEQ ID NOs: 118 and 44 | SEQ ID NO: 150 |
| SEQ ID NO: 39 | SEQ ID NOs: 118 and 44 | SEQ ID NO: 151 |
| SEQ ID NO: 39 | SEQ ID NOs: 118 and 44 | SEQ ID NO: 152 |
| SEQ ID NO: 39 | SEQ ID NOs: 118 and 44 | SEQ ID NO: 153 |
| SEQ ID NO: 39 | SEQ ID NOs: 118 and 44 | SEQ ID NO: 154 |
| SEQ ID NO: 39 | SEQ ID NOs: 118 and 44 | SEQ ID NO: 155 |
| SEQ ID NO: 39 | SEQ ID NOs: 118 and 44 | SEQ ID NO: 156 |
| SEQ ID NO: 39 | SEQ ID NOs: 118 and 44 | SEQ ID NO: 157 |
| SEQ ID NO: 39 | SEQ ID NOs: 118 and 44 | SEQ ID NO: 158 |
| SEQ ID NO: 39 | SEQ ID NOs: 118 and 44 | SEQ ID NO: 159 |
| SEQ ID NO: 39 | SEQ ID NOs: 118 and 44 | SEQ ID NO: 160 |
| SEQ ID NO: 39 | SEQ ID NOs: 118 and 44 | SEQ ID NO: 161 |
| SEQ ID NO: 39 | SEQ ID NOs: 118 and 44 | SEQ ID NO: 162 |
| SEQ ID NO: 39 | SEQ ID NOs: 118 and 44 | SEQ ID NO: 163 |
| SEQ ID NO: 39 | SEQ ID NOs: 118 and 44 | SEQ ID NO: 164 |
| SEQ ID NO: 39 | SEQ ID NOs: 118 and 44 | SEQ ID NO: 165 |
| SEQ ID NO: 39 | SEQ ID NOs: 118 and 44 | SEQ ID NO: 166 |
| SEQ ID NO: 39 | SEQ ID NOs: 118 and 44 | SEQ ID NO: 167 |
| SEQ ID NO: 39 | SEQ ID NOs: 118 and 44 | SEQ ID NO: 168 |
| SEQ ID NO: 39 | SEQ ID NOs: 118 and 44 | SEQ ID NO: 169 |
| SEQ ID NO: 39 | SEQ ID NOs: 118 and 44 | SEQ ID NO: 170 |
| SEQ ID NO: 39 | SEQ ID NOs: 118 and 44 | SEQ ID NO: 171 |
| SEQ ID NO: 39 | SEQ ID NOs: 118 and 44 | SEQ ID NO: 172 |
| SEQ ID NO: 39 | SEQ ID NOs: 118 and 44 | SEQ ID NO: 173 |
| SEQ ID NO: 39 | SEQ ID NOs: 118 and 44 | SEQ ID NO: 174 |
| SEQ ID NO: 39 | SEQ ID NOs: 118 and 44 | SEQ ID NO: 175 |
| SEQ ID NO: 39 | SEQ ID NOs: 118 and 44 | SEQ ID NO: 176 |
| SEQ ID NO: 39 | SEQ ID NOs: 118 and 44 | SEQ ID NO: 177 |
| SEQ ID NO: 39 | SEQ ID NOs: 118 and 44 | SEQ ID NO: 178 |
| SEQ ID NO: 39 | SEQ ID NOs: 118 and 44 | SEQ ID NO: 179 |
| SEQ ID NO: 39 | SEQ ID NOs: 118 and 44 | SEQ ID NO: 180 |
| SEQ ID NO: 39 | SEQ ID NOs: 118 and 44 | SEQ ID NO: 181 |
| SEQ ID NO: 39 | SEQ ID NOs: 118 and 44 | SEQ ID NO: 182 |
| SEQ ID NO: 39 | SEQ ID NOs: 118 and 44 | SEQ ID NO: 183 |
| SEQ ID NO: 39 | SEQ ID NOs: 118 and 44 | SEQ ID NO: 184 |
| SEQ ID NO: 39 | SEQ ID NOs: 118 and 44 | SEQ ID NO: 185 |
| SEQ ID NO: 39 | SEQ ID NOs: 118 and 44 | SEQ ID NO: 186 |
| SEQ ID NO: 39 | SEQ ID NOs: 118 and 44 | SEQ ID NO: 187 |
| SEQ ID NO: 39 | SEQ ID NOs: 118 and 44 | SEQ ID NO: 188 |
| SEQ ID NO: 39 | SEQ ID NOs: 118 and 44 | SEQ ID NO: 189 |
| SEQ ID NO: 39 | SEQ ID NOs: 118 and 44 | SEQ ID NO: 190 |
| SEQ ID NO: 39 | SEQ ID NOs: 118 and 44 | SEQ ID NO: 191 |
| SEQ ID NO: 39 | SEQ ID NOs: 118 and 44 | SEQ ID NO: 192 |
| SEQ ID NO: 39 | SEQ ID NOs: 118 and 44 | SEQ ID NO: 193 |
| SEQ ID NO: 39 | SEQ ID NOs: 118 and 44 | SEQ ID NO: 194 |
| SEQ ID NO: 39 | SEQ ID NOs: 118 and 44 | SEQ ID NO: 195 |
| SEQ ID NO: 39 | SEQ ID NOs: 118 and 44 | SEQ ID NO: 196 |
| SEQ ID NO: 39 | SEQ ID NOs: 118 and 44 | SEQ ID NO: 197 |
| SEQ ID NO: 39 | SEQ ID NOs: 118 and 44 | SEQ ID NO: 198 |
| SEQ ID NO: 39 | SEQ ID NOs: 118 and 44 | SEQ ID NO: 199 |
| SEQ ID NO: 39 | SEQ ID NOs: 118 and 44 | SEQ ID NO: 200 |
| SEQ ID NO: 39 | SEQ ID NOs: 118 and 44 | SEQ ID NO: 201 |
| SEQ ID NO: 39 | SEQ ID NOs: 118 and 44 | SEQ ID NO: 202 |
| SEQ ID NO: 39 | SEQ ID NOs: 118 and 44 | SEQ ID NO: 203 |
| SEQ ID NO: 39 | SEQ ID NOs: 118 and 44 | SEQ ID NO: 204 |
| SEQ ID NO: 39 | SEQ ID NOs: 118 and 44 | SEQ ID NO: 205 |
| SEQ ID NO: 39 | SEQ ID NOs: 118 and 44 | SEQ ID NO: 206 |
| SEQ ID NO: 39 | SEQ ID NOs: 118 and 44 | SEQ ID NO: 207 |
| SEQ ID NO: 39 | SEQ ID NOs: 118 and 44 | SEQ ID NO: 208 |
| SEQ ID NO: 39 | SEQ ID NOs: 118 and 44 | SEQ ID NO: 209 |
| SEQ ID NO: 39 | SEQ ID NOs: 118 and 44 | SEQ ID NO: 210 |
| SEQ ID NO: 39 | SEQ ID NOs: 118 and 44 | SEQ ID NO: 211 |
| SEQ ID NO: 39 | SEQ ID NOs: 118 and 44 | SEQ ID NO: 212 |
| SEQ ID NO: 39 | SEQ ID NOs: 118 and 44 | SEQ ID NO: 213 |
| SEQ ID NO: 39 | SEQ ID NOs: 118 and 44 | SEQ ID NO: 214 |
| SEQ ID NO: 39 | SEQ ID NOs: 118 and 44 | SEQ ID NO: 215 |
| SEQ ID NO: 39 | SEQ ID NOs: 118 and 44 | SEQ ID NO: 216 |
| SEQ ID NO: 39 | SEQ ID NOs: 118 and 44 | SEQ ID NO: 217 |
| SEQ ID NO: 39 | SEQ ID NOs: 118 and 44 | SEQ ID NO: 218 |
| SEQ ID NO: 39 | SEQ ID NOs: 118 and 44 | SEQ ID NO: 219 |
| SEQ ID NO: 39 | SEQ ID NOs: 118 and 44 | SEQ ID NO: 220 |
| SEQ ID NO: 39 | SEQ ID NOs: 118 and 44 | SEQ ID NO: 221 |
| SEQ ID NO: 41 | SEQ ID NOs: 118 and 44 | SEQ ID NO: 120 |
| SEQ ID NO: 41 | SEQ ID NOs: 118 and 44 | SEQ ID NO: 121 |
| SEQ ID NO: 41 | SEQ ID NOs: 118 and 44 | SEQ ID NO: 122 |
| SEQ ID NO: 41 | SEQ ID NOs: 118 and 44 | SEQ ID NO: 123 |
| SEQ ID NO: 41 | SEQ ID NOs: 118 and 44 | SEQ ID NO: 124 |
| SEQ ID NO: 41 | SEQ ID NOs: 118 and 44 | SEQ ID NO: 125 |
| SEQ ID NO: 41 | SEQ ID NOs: 118 and 44 | SEQ ID NO: 126 |
| SEQ ID NO: 41 | SEQ ID NOs: 118 and 44 | SEQ ID NO: 127 |
| SEQ ID NO: 41 | SEQ ID NOs: 118 and 44 | SEQ ID NO: 128 |
| SEQ ID NO: 41 | SEQ ID NOs: 118 and 44 | SEQ ID NO: 129 |
| SEQ ID NO: 41 | SEQ ID NOs: 118 and 44 | SEQ ID NO: 130 |
| SEQ ID NO: 41 | SEQ ID NOs: 118 and 44 | SEQ ID NO: 131 |
| SEQ ID NO: 41 | SEQ ID NOs: 118 and 44 | SEQ ID NO: 132 |
| SEQ ID NO: 41 | SEQ ID NOs: 118 and 44 | SEQ ID NO: 133 |
| SEQ ID NO: 41 | SEQ ID NOs: 118 and 44 | SEQ ID NO: 134 |
| SEQ ID NO: 41 | SEQ ID NOs: 118 and 44 | SEQ ID NO: 135 |
| SEQ ID NO: 41 | SEQ ID NOs: 118 and 44 | SEQ ID NO: 136 |
| SEQ ID NO: 41 | SEQ ID NOs: 118 and 44 | SEQ ID NO: 137 |
| SEQ ID NO: 41 | SEQ ID NOs: 118 and 44 | SEQ ID NO: 138 |
| SEQ ID NO: 41 | SEQ ID NOs: 118 and 44 | SEQ ID NO: 139 |
| SEQ ID NO: 41 | SEQ ID NOs: 118 and 44 | SEQ ID NO: 140 |
| SEQ ID NO: 41 | SEQ ID NOs: 118 and 44 | SEQ ID NO: 141 |
| SEQ ID NO: 41 | SEQ ID NOs: 118 and 44 | SEQ ID NO: 142 |
| SEQ ID NO: 41 | SEQ ID NOs: 118 and 44 | SEQ ID NO: 143 |
| SEQ ID NO: 41 | SEQ ID NOs: 118 and 44 | SEQ ID NO: 144 |
| SEQ ID NO: 41 | SEQ ID NOs: 118 and 44 | SEQ ID NO: 145 |
| SEQ ID NO: 41 | SEQ ID NOs: 118 and 44 | SEQ ID NO: 146 |
| SEQ ID NO: 41 | SEQ ID NOs: 118 and 44 | SEQ ID NO: 147 |
| SEQ ID NO: 41 | SEQ ID NOs: 118 and 44 | SEQ ID NO: 148 |
| SEQ ID NO: 41 | SEQ ID NOs: 118 and 44 | SEQ ID NO: 149 |
| SEQ ID NO: 41 | SEQ ID NOs: 118 and 44 | SEQ ID NO: 150 |
| SEQ ID NO: 41 | SEQ ID NOs: 118 and 44 | SEQ ID NO: 151 |
| SEQ ID NO: 41 | SEQ ID NOs: 118 and 44 | SEQ ID NO: 152 |
| SEQ ID NO: 41 | SEQ ID NOs: 118 and 44 | SEQ ID NO: 153 |
| SEQ ID NO: 41 | SEQ ID NOs: 118 and 44 | SEQ ID NO: 154 |
| SEQ ID NO: 41 | SEQ ID NOs: 118 and 44 | SEQ ID NO: 155 |
| SEQ ID NO: 41 | SEQ ID NOs: 118 and 44 | SEQ ID NO: 156 |
| SEQ ID NO: 41 | SEQ ID NOs: 118 and 44 | SEQ ID NO: 157 |
| SEQ ID NO: 41 | SEQ ID NOs: 118 and 44 | SEQ ID NO: 158 |
| SEQ ID NO: 41 | SEQ ID NOs: 118 and 44 | SEQ ID NO: 159 |
| SEQ ID NO: 41 | SEQ ID NOs: 118 and 44 | SEQ ID NO: 160 |
| SEQ ID NO: 41 | SEQ ID NOs: 118 and 44 | SEQ ID NO: 161 |
| SEQ ID NO: 41 | SEQ ID NOs: 118 and 44 | SEQ ID NO: 162 |
| SEQ ID NO: 41 | SEQ ID NOs: 118 and 44 | SEQ ID NO: 163 |
| SEQ ID NO: 41 | SEQ ID NOs: 118 and 44 | SEQ ID NO: 164 |
| SEQ ID NO: 41 | SEQ ID NOs: 118 and 44 | SEQ ID NO: 165 |
| SEQ ID NO: 41 | SEQ ID NOs: 118 and 44 | SEQ ID NO: 166 |
| SEQ ID NO: 41 | SEQ ID NOs: 118 and 44 | SEQ ID NO: 167 |
| SEQ ID NO: 41 | SEQ ID NOs: 118 and 44 | SEQ ID NO: 168 |
| SEQ ID NO: 41 | SEQ ID NOs: 118 and 44 | SEQ ID NO: 169 |
| SEQ ID NO: 41 | SEQ ID NOs: 118 and 44 | SEQ ID NO: 170 |
| SEQ ID NO: 41 | SEQ ID NOs: 118 and 44 | SEQ ID NO: 171 |
| SEQ ID NO: 41 | SEQ ID NOs: 118 and 44 | SEQ ID NO: 172 |
| SEQ ID NO: 41 | SEQ ID NOs: 118 and 44 | SEQ ID NO: 173 |
| SEQ ID NO: 41 | SEQ ID NOs: 118 and 44 | SEQ ID NO: 174 |
| SEQ ID NO: 41 | SEQ ID NOs: 118 and 44 | SEQ ID NO: 175 |
| SEQ ID NO: 41 | SEQ ID NOs: 118 and 44 | SEQ ID NO: 176 |
| SEQ ID NO: 41 | SEQ ID NOs: 118 and 44 | SEQ ID NO: 177 |
| SEQ ID NO: 41 | SEQ ID NOs: 118 and 44 | SEQ ID NO: 178 |
| SEQ ID NO: 41 | SEQ ID NOs: 118 and 44 | SEQ ID NO: 179 |
| SEQ ID NO: 41 | SEQ ID NOs: 118 and 44 | SEQ ID NO: 180 |
| SEQ ID NO: 41 | SEQ ID NOs: 118 and 44 | SEQ ID NO: 181 |
| SEQ ID NO: 41 | SEQ ID NOs: 118 and 44 | SEQ ID NO: 182 |
| SEQ ID NO: 41 | SEQ ID NOs: 118 and 44 | SEQ ID NO: 183 |
| SEQ ID NO: 41 | SEQ ID NOs: 118 and 44 | SEQ ID NO: 184 |
| SEQ ID NO: 41 | SEQ ID NOs: 118 and 44 | SEQ ID NO: 185 |
| SEQ ID NO: 41 | SEQ ID NOs: 118 and 44 | SEQ ID NO: 186 |
| SEQ ID NO: 41 | SEQ ID NOs: 118 and 44 | SEQ ID NO: 187 |
| SEQ ID NO: 41 | SEQ ID NOs: 118 and 44 | SEQ ID NO: 188 |
| SEQ ID NO: 41 | SEQ ID NOs: 118 and 44 | SEQ ID NO: 189 |
| SEQ ID NO: 41 | SEQ ID NOs: 118 and 44 | SEQ ID NO: 190 |
| SEQ ID NO: 41 | SEQ ID NOs: 118 and 44 | SEQ ID NO: 191 |
| SEQ ID NO: 41 | SEQ ID NOs: 118 and 44 | SEQ ID NO: 192 |
| SEQ ID NO: 41 | SEQ ID NOs: 118 and 44 | SEQ ID NO: 193 |
| SEQ ID NO: 41 | SEQ ID NOs: 118 and 44 | SEQ ID NO: 194 |
| SEQ ID NO: 41 | SEQ ID NOs: 118 and 44 | SEQ ID NO: 195 |
| SEQ ID NO: 41 | SEQ ID NOs: 118 and 44 | SEQ ID NO: 196 |
| SEQ ID NO: 41 | SEQ ID NOs: 118 and 44 | SEQ ID NO: 197 |
| SEQ ID NO: 41 | SEQ ID NOs: 118 and 44 | SEQ ID NO: 198 |
| SEQ ID NO: 41 | SEQ ID NOs: 118 and 44 | SEQ ID NO: 199 |
| SEQ ID NO: 41 | SEQ ID NOs: 118 and 44 | SEQ ID NO: 200 |
| SEQ ID NO: 41 | SEQ ID NOs: 118 and 44 | SEQ ID NO: 201 |
| SEQ ID NO: 41 | SEQ ID NOs: 118 and 44 | SEQ ID NO: 202 |
| SEQ ID NO: 41 | SEQ ID NOs: 118 and 44 | SEQ ID NO: 203 |
| SEQ ID NO: 41 | SEQ ID NOs: 118 and 44 | SEQ ID NO: 204 |
| SEQ ID NO: 41 | SEQ ID NOs: 118 and 44 | SEQ ID NO: 205 |
| SEQ ID NO: 41 | SEQ ID NOs: 118 and 44 | SEQ ID NO: 206 |
| SEQ ID NO: 41 | SEQ ID NOs: 118 and 44 | SEQ ID NO: 207 |
| SEQ ID NO: 41 | SEQ ID NOs: 118 and 44 | SEQ ID NO: 208 |
| SEQ ID NO: 41 | SEQ ID NOs: 118 and 44 | SEQ ID NO: 209 |
| SEQ ID NO: 41 | SEQ ID NOs: 118 and 44 | SEQ ID NO: 210 |
| SEQ ID NO: 41 | SEQ ID NOs: 118 and 44 | SEQ ID NO: 211 |
| SEQ ID NO: 41 | SEQ ID NOs: 118 and 44 | SEQ ID NO: 212 |
| SEQ ID NO: 41 | SEQ ID NOs: 118 and 44 | SEQ ID NO: 213 |
| SEQ ID NO: 41 | SEQ ID NOs: 118 and 44 | SEQ ID NO: 214 |
| SEQ ID NO: 41 | SEQ ID NOs: 118 and 44 | SEQ ID NO: 215 |
| SEQ ID NO: 41 | SEQ ID NOs: 118 and 44 | SEQ ID NO: 216 |
| SEQ ID NO: 41 | SEQ ID NOs: 118 and 44 | SEQ ID NO: 217 |
| SEQ ID NO: 41 | SEQ ID NOs: 118 and 44 | SEQ ID NO: 218 |
| SEQ ID NO: 41 | SEQ ID NOs: 118 and 44 | SEQ ID NO: 219 |
| SEQ ID NO: 41 | SEQ ID NOs: 118 and 44 | SEQ ID NO: 220 |
| SEQ ID NO: 41 | SEQ ID NOs: 118 and 44 | SEQ ID NO: 221 |
| SEQ ID NO: 43 | SEQ ID NOs: 118 and 44 | SEQ ID NO: 120 |
| SEQ ID NO: 43 | SEQ ID NOs: 118 and 44 | SEQ ID NO: 121 |
| SEQ ID NO: 43 | SEQ ID NOs: 118 and 44 | SEQ ID NO: 122 |
| SEQ ID NO: 43 | SEQ ID NOs: 118 and 44 | SEQ ID NO: 123 |
| SEQ ID NO: 43 | SEQ ID NOs: 118 and 44 | SEQ ID NO: 124 |
| SEQ ID NO: 43 | SEQ ID NOs: 118 and 44 | SEQ ID NO: 125 |
| SEQ ID NO: 43 | SEQ ID NOs: 118 and 44 | SEQ ID NO: 126 |
| SEQ ID NO: 43 | SEQ ID NOs: 118 and 44 | SEQ ID NO: 127 |
| SEQ ID NO: 43 | SEQ ID NOs: 118 and 44 | SEQ ID NO: 128 |
| SEQ ID NO: 43 | SEQ ID NOs: 118 and 44 | SEQ ID NO: 129 |
| SEQ ID NO: 43 | SEQ ID NOs: 118 and 44 | SEQ ID NO: 130 |
| SEQ ID NO: 43 | SEQ ID NOs: 118 and 44 | SEQ ID NO: 131 |
| SEQ ID NO: 43 | SEQ ID NOs: 118 and 44 | SEQ ID NO: 132 |
| SEQ ID NO: 43 | SEQ ID NOs: 118 and 44 | SEQ ID NO: 133 |
| SEQ ID NO: 43 | SEQ ID NOs: 118 and 44 | SEQ ID NO: 134 |
| SEQ ID NO: 43 | SEQ ID NOs: 118 and 44 | SEQ ID NO: 135 |
| SEQ ID NO: 43 | SEQ ID NOs: 118 and 44 | SEQ ID NO: 136 |
| SEQ ID NO: 43 | SEQ ID NOs: 118 and 44 | SEQ ID NO: 137 |
| SEQ ID NO: 43 | SEQ ID NOs: 118 and 44 | SEQ ID NO: 138 |
| SEQ ID NO: 43 | SEQ ID NOs: 118 and 44 | SEQ ID NO: 139 |
| SEQ ID NO: 43 | SEQ ID NOs: 118 and 44 | SEQ ID NO: 140 |
| SEQ ID NO: 43 | SEQ ID NOs: 118 and 44 | SEQ ID NO: 141 |
| SEQ ID NO: 43 | SEQ ID NOs: 118 and 44 | SEQ ID NO: 142 |
| SEQ ID NO: 43 | SEQ ID NOs: 118 and 44 | SEQ ID NO: 143 |
| SEQ ID NO: 43 | SEQ ID NOs: 118 and 44 | SEQ ID NO: 144 |
| SEQ ID NO: 43 | SEQ ID NOs: 118 and 44 | SEQ ID NO: 145 |
| SEQ ID NO: 43 | SEQ ID NOs: 118 and 44 | SEQ ID NO: 146 |
| SEQ ID NO: 43 | SEQ ID NOs: 118 and 44 | SEQ ID NO: 147 |
| SEQ ID NO: 43 | SEQ ID NOs: 118 and 44 | SEQ ID NO: 148 |
| SEQ ID NO: 43 | SEQ ID NOs: 118 and 44 | SEQ ID NO: 149 |
| SEQ ID NO: 43 | SEQ ID NOs: 118 and 44 | SEQ ID NO: 150 |
| SEQ ID NO: 43 | SEQ ID NOs: 118 and 44 | SEQ ID NO: 151 |
| SEQ ID NO: 43 | SEQ ID NOs: 118 and 44 | SEQ ID NO: 152 |
| SEQ ID NO: 43 | SEQ ID NOs: 118 and 44 | SEQ ID NO: 153 |
| SEQ ID NO: 43 | SEQ ID NOs: 118 and 44 | SEQ ID NO: 154 |
| SEQ ID NO: 43 | SEQ ID NOs: 118 and 44 | SEQ ID NO: 155 |
| SEQ ID NO: 43 | SEQ ID NOs: 118 and 44 | SEQ ID NO: 156 |
| SEQ ID NO: 43 | SEQ ID NOs: 118 and 44 | SEQ ID NO: 157 |
| SEQ ID NO: 43 | SEQ ID NOs: 118 and 44 | SEQ ID NO: 158 |
| SEQ ID NO: 43 | SEQ ID NOs: 118 and 44 | SEQ ID NO: 159 |
| SEQ ID NO: 43 | SEQ ID NOs: 118 and 44 | SEQ ID NO: 160 |
| SEQ ID NO: 43 | SEQ ID NOs: 118 and 44 | SEQ ID NO: 161 |
| SEQ ID NO: 43 | SEQ ID NOs: 118 and 44 | SEQ ID NO: 162 |
| SEQ ID NO: 43 | SEQ ID NOs: 118 and 44 | SEQ ID NO: 163 |
| SEQ ID NO: 43 | SEQ ID NOs: 118 and 44 | SEQ ID NO: 164 |
| SEQ ID NO: 43 | SEQ ID NOs: 118 and 44 | SEQ ID NO: 165 |
| SEQ ID NO: 43 | SEQ ID NOs: 118 and 44 | SEQ ID NO: 166 |
| SEQ ID NO: 43 | SEQ ID NOs: 118 and 44 | SEQ ID NO: 167 |
| SEQ ID NO: 43 | SEQ ID NOs: 118 and 44 | SEQ ID NO: 168 |
| SEQ ID NO: 43 | SEQ ID NOs: 118 and 44 | SEQ ID NO: 169 |
| SEQ ID NO: 43 | SEQ ID NOs: 118 and 44 | SEQ ID NO: 170 |
| SEQ ID NO: 43 | SEQ ID NOs: 118 and 44 | SEQ ID NO: 171 |
| SEQ ID NO: 43 | SEQ ID NOs: 118 and 44 | SEQ ID NO: 172 |
| SEQ ID NO: 43 | SEQ ID NOs: 118 and 44 | SEQ ID NO: 173 |
| SEQ ID NO: 43 | SEQ ID NOs: 118 and 44 | SEQ ID NO: 174 |
| SEQ ID NO: 43 | SEQ ID NOs: 118 and 44 | SEQ ID NO: 175 |
| SEQ ID NO: 43 | SEQ ID NOs: 118 and 44 | SEQ ID NO: 176 |
| SEQ ID NO: 43 | SEQ ID NOs: 118 and 44 | SEQ ID NO: 177 |
| SEQ ID NO: 43 | SEQ ID NOs: 118 and 44 | SEQ ID NO: 178 |
| SEQ ID NO: 43 | SEQ ID NOs: 118 and 44 | SEQ ID NO: 179 |
| SEQ ID NO: 43 | SEQ ID NOs: 118 and 44 | SEQ ID NO: 180 |
| SEQ ID NO: 43 | SEQ ID NOs: 118 and 44 | SEQ ID NO: 181 |
| SEQ ID NO: 43 | SEQ ID NOs: 118 and 44 | SEQ ID NO: 182 |
| SEQ ID NO: 43 | SEQ ID NOs: 118 and 44 | SEQ ID NO: 183 |
| SEQ ID NO: 43 | SEQ ID NOs: 118 and 44 | SEQ ID NO: 184 |
| SEQ ID NO: 43 | SEQ ID NOs: 118 and 44 | SEQ ID NO: 185 |
| SEQ ID NO: 43 | SEQ ID NOs: 118 and 44 | SEQ ID NO: 186 |
| SEQ ID NO: 43 | SEQ ID NOs: 118 and 44 | SEQ ID NO: 187 |
| SEQ ID NO: 43 | SEQ ID NOs: 118 and 44 | SEQ ID NO: 188 |
| SEQ ID NO: 43 | SEQ ID NOs: 118 and 44 | SEQ ID NO: 189 |
| SEQ ID NO: 43 | SEQ ID NOs: 118 and 44 | SEQ ID NO: 190 |
| SEQ ID NO: 43 | SEQ ID NOs: 118 and 44 | SEQ ID NO: 191 |
| SEQ ID NO: 43 | SEQ ID NOs: 118 and 44 | SEQ ID NO: 192 |
| SEQ ID NO: 43 | SEQ ID NOs: 118 and 44 | SEQ ID NO: 193 |
| SEQ ID NO: 43 | SEQ ID NOs: 118 and 44 | SEQ ID NO: 194 |
| SEQ ID NO: 43 | SEQ ID NOs: 118 and 44 | SEQ ID NO: 195 |
| SEQ ID NO: 43 | SEQ ID NOs: 118 and 44 | SEQ ID NO: 196 |
| SEQ ID NO: 43 | SEQ ID NOs: 118 and 44 | SEQ ID NO: 197 |
| SEQ ID NO: 43 | SEQ ID NOs: 118 and 44 | SEQ ID NO: 198 |
| SEQ ID NO: 43 | SEQ ID NOs: 118 and 44 | SEQ ID NO: 199 |
| SEQ ID NO: 43 | SEQ ID NOs: 118 and 44 | SEQ ID NO: 200 |
| SEQ ID NO: 43 | SEQ ID NOs: 118 and 44 | SEQ ID NO: 201 |
| SEQ ID NO: 43 | SEQ ID NOs: 118 and 44 | SEQ ID NO: 202 |
| SEQ ID NO: 43 | SEQ ID NOs: 118 and 44 | SEQ ID NO: 203 |
| SEQ ID NO: 43 | SEQ ID NOs: 118 and 44 | SEQ ID NO: 204 |
| SEQ ID NO: 43 | SEQ ID NOs: 118 and 44 | SEQ ID NO: 205 |
| SEQ ID NO: 43 | SEQ ID NOs: 118 and 44 | SEQ ID NO: 206 |
| SEQ ID NO: 43 | SEQ ID NOs: 118 and 44 | SEQ ID NO: 207 |
| SEQ ID NO: 43 | SEQ ID NOs: 118 and 44 | SEQ ID NO: 208 |
| SEQ ID NO: 43 | SEQ ID NOs: 118 and 44 | SEQ ID NO: 209 |
| SEQ ID NO: 43 | SEQ ID NOs: 118 and 44 | SEQ ID NO: 210 |
| SEQ ID NO: 43 | SEQ ID NOs: 118 and 44 | SEQ ID NO: 211 |
| SEQ ID NO: 43 | SEQ ID NOs: 118 and 44 | SEQ ID NO: 212 |
| SEQ ID NO: 43 | SEQ ID NOs: 118 and 44 | SEQ ID NO: 213 |
| SEQ ID NO: 43 | SEQ ID NOs: 118 and 44 | SEQ ID NO: 214 |
| SEQ ID NO: 43 | SEQ ID NOs: 118 and 44 | SEQ ID NO: 215 |
| SEQ ID NO: 43 | SEQ ID NOs: 118 and 44 | SEQ ID NO: 216 |
| SEQ ID NO: 43 | SEQ ID NOs: 118 and 44 | SEQ ID NO: 217 |
| SEQ ID NO: 43 | SEQ ID NOs: 118 and 44 | SEQ ID NO: 218 |
| SEQ ID NO: 43 | SEQ ID NOs: 118 and 44 | SEQ ID NO: 219 |
| SEQ ID NO: 43 | SEQ ID NOs: 118 and 44 | SEQ ID NO: 220 |
| SEQ ID NO: 43 | SEQ ID NOs: 118 and 44 | SEQ ID NO: 221 |
| SEQ ID NO: 43 | SEQ ID NOs: 118 and 44 | SEQ ID NO: 329 |
| SEQ ID NO: 43 | SEQ ID NOs: 118 and 44 | SEQ ID NO: 332 |
| SEQ ID NO: 43 | SEQ ID NOs: 118 and 44 | SEQ ID NO: 335 |

TABLE 6
Example configurations of fusion proteins
Components (from an N-terminus to C-terminus direction)

| Heterologous | | Mutant Soluble |
|---|---|---|
| Protein | Linker(s) | ActRIIB-ECD polypeptide |
| SEQ ID NO: 39 | SEQ ID NO: 44 | SEQ ID NO: 119 |
| SEQ ID NO: 39 | SEQ ID NO: 44 | SEQ ID NO: 120 |
| SEQ ID NO: 39 | SEQ ID NO: 44 | SEQ ID NO: 121 |
| SEQ ID NO: 39 | SEQ ID NO: 44 | SEQ ID NO: 122 |
| SEQ ID NO: 39 | SEQ ID NO: 44 | SEQ ID NO: 123 |
| SEQ ID NO: 39 | SEQ ID NO: 44 | SEQ ID NO: 124 |
| SEQ ID NO: 39 | SEQ ID NO: 44 | SEQ ID NO: 125 |
| SEQ ID NO: 39 | SEQ ID NO: 44 | SEQ ID NO: 126 |
| SEQ ID NO: 39 | SEQ ID NO: 44 | SEQ ID NO: 127 |
| SEQ ID NO: 39 | SEQ ID NO: 44 | SEQ ID NO: 128 |
| SEQ ID NO: 39 | SEQ ID NO: 44 | SEQ ID NO: 129 |
| SEQ ID NO: 39 | SEQ ID NO: 44 | SEQ ID NO: 130 |
| SEQ ID NO: 39 | SEQ ID NO: 44 | SEQ ID NO: 131 |
| SEQ ID NO: 39 | SEQ ID NO: 44 | SEQ ID NO: 132 |
| SEQ ID NO: 39 | SEQ ID NO: 44 | SEQ ID NO: 133 |
| SEQ ID NO: 39 | SEQ ID NO: 44 | SEQ ID NO: 134 |
| SEQ ID NO: 39 | SEQ ID NO: 44 | SEQ ID NO: 135 |
| SEQ ID NO: 39 | SEQ ID NO: 44 | SEQ ID NO: 136 |
| SEQ ID NO: 39 | SEQ ID NO: 44 | SEQ ID NO: 137 |
| SEQ ID NO: 39 | SEQ ID NO: 44 | SEQ ID NO: 138 |
| SEQ ID NO: 39 | SEQ ID NO: 44 | SEQ ID NO: 139 |
| SEQ ID NO: 39 | SEQ ID NO: 44 | SEQ ID NO: 140 |
| SEQ ID NO: 39 | SEQ ID NO: 44 | SEQ ID NO: 141 |
| SEQ ID NO: 39 | SEQ ID NO: 44 | SEQ ID NO: 142 |
| SEQ ID NO: 39 | SEQ ID NO: 44 | SEQ ID NO: 143 |
| SEQ ID NO: 39 | SEQ ID NO: 44 | SEQ ID NO: 144 |
| SEQ ID NO: 39 | SEQ ID NO: 44 | SEQ ID NO: 145 |
| SEQ ID NO: 39 | SEQ ID NO: 44 | SEQ ID NO: 146 |
| SEQ ID NO: 39 | SEQ ID NO: 44 | SEQ ID NO: 147 |
| SEQ ID NO: 39 | SEQ ID NO: 44 | SEQ ID NO: 148 |
| SEQ ID NO: 39 | SEQ ID NO: 44 | SEQ ID NO: 149 |
| SEQ ID NO: 39 | SEQ ID NO: 44 | SEQ ID NO: 150 |
| SEQ ID NO: 39 | SEQ ID NO: 44 | SEQ ID NO: 151 |
| SEQ ID NO: 39 | SEQ ID NO: 44 | SEQ ID NO: 152 |
| SEQ ID NO: 39 | SEQ ID NO: 44 | SEQ ID NO: 153 |
| SEQ ID NO: 39 | SEQ ID NO: 44 | SEQ ID NO: 154 |
| SEQ ID NO: 39 | SEQ ID NO: 44 | SEQ ID NO: 155 |
| SEQ ID NO: 39 | SEQ ID NO: 44 | SEQ ID NO: 156 |
| SEQ ID NO: 39 | SEQ ID NO: 44 | SEQ ID NO: 157 |
| SEQ ID NO: 39 | SEQ ID NO: 44 | SEQ ID NO: 158 |
| SEQ ID NO: 39 | SEQ ID NO: 44 | SEQ ID NO: 159 |
| SEQ ID NO: 39 | SEQ ID NO: 44 | SEQ ID NO: 160 |
| SEQ ID NO: 39 | SEQ ID NO: 44 | SEQ ID NO: 161 |
| SEQ ID NO: 39 | SEQ ID NO: 44 | SEQ ID NO: 162 |
| SEQ ID NO: 39 | SEQ ID NO: 44 | SEQ ID NO: 163 |
| SEQ ID NO: 39 | SEQ ID NO: 44 | SEQ ID NO: 164 |
| SEQ ID NO: 39 | SEQ ID NO: 44 | SEQ ID NO: 165 |
| SEQ ID NO: 39 | SEQ ID NO: 44 | SEQ ID NO: 166 |
| SEQ ID NO: 39 | SEQ ID NO: 44 | SEQ ID NO: 167 |
| SEQ ID NO: 39 | SEQ ID NO: 44 | SEQ ID NO: 168 |
| SEQ ID NO: 39 | SEQ ID NO: 44 | SEQ ID NO: 169 |
| SEQ ID NO: 39 | SEQ ID NO: 44 | SEQ ID NO: 170 |
| SEQ ID NO: 39 | SEQ ID NO: 44 | SEQ ID NO: 171 |
| SEQ ID NO: 39 | SEQ ID NO: 44 | SEQ ID NO: 172 |
| SEQ ID NO: 39 | SEQ ID NO: 44 | SEQ ID NO: 173 |
| SEQ ID NO: 39 | SEQ ID NO: 44 | SEQ ID NO: 174 |
| SEQ ID NO: 39 | SEQ ID NO: 44 | SEQ ID NO: 175 |
| SEQ ID NO: 39 | SEQ ID NO: 44 | SEQ ID NO: 176 |
| SEQ ID NO: 39 | SEQ ID NO: 44 | SEQ ID NO: 177 |
| SEQ ID NO: 39 | SEQ ID NO: 44 | SEQ ID NO: 178 |
| SEQ ID NO: 39 | SEQ ID NO: 44 | SEQ ID NO: 179 |
| SEQ ID NO: 39 | SEQ ID NO: 44 | SEQ ID NO: 180 |
| SEQ ID NO: 39 | SEQ ID NO: 44 | SEQ ID NO: 181 |
| SEQ ID NO: 39 | SEQ ID NO: 44 | SEQ ID NO: 182 |
| SEQ ID NO: 39 | SEQ ID NO: 44 | SEQ ID NO: 183 |
| SEQ ID NO: 39 | SEQ ID NO: 44 | SEQ ID NO: 184 |
| SEQ ID NO: 39 | SEQ ID NO: 44 | SEQ ID NO: 185 |
| SEQ ID NO: 39 | SEQ ID NO: 44 | SEQ ID NO: 186 |
| SEQ ID NO: 39 | SEQ ID NO: 44 | SEQ ID NO: 187 |
| SEQ ID NO: 39 | SEQ ID NO: 44 | SEQ ID NO: 188 |
| SEQ ID NO: 39 | SEQ ID NO: 44 | SEQ ID NO: 189 |
| SEQ ID NO: 39 | SEQ ID NO: 44 | SEQ ID NO: 190 |
| SEQ ID NO: 39 | SEQ ID NO: 44 | SEQ ID NO: 191 |
| SEQ ID NO: 39 | SEQ ID NO: 44 | SEQ ID NO: 192 |
| SEQ ID NO: 39 | SEQ ID NO: 44 | SEQ ID NO: 193 |
| SEQ ID NO: 39 | SEQ ID NO: 44 | SEQ ID NO: 194 |
| SEQ ID NO: 39 | SEQ ID NO: 44 | SEQ ID NO: 195 |
| SEQ ID NO: 39 | SEQ ID NO: 44 | SEQ ID NO: 196 |
| SEQ ID NO: 39 | SEQ ID NO: 44 | SEQ ID NO: 197 |
| SEQ ID NO: 39 | SEQ ID NO: 44 | SEQ ID NO: 198 |
| SEQ ID NO: 39 | SEQ ID NO: 44 | SEQ ID NO: 199 |
| SEQ ID NO: 39 | SEQ ID NO: 44 | SEQ ID NO: 200 |
| SEQ ID NO: 39 | SEQ ID NO: 44 | SEQ ID NO: 201 |
| SEQ ID NO: 39 | SEQ ID NO: 44 | SEQ ID NO: 202 |
| SEQ ID NO: 39 | SEQ ID NO: 44 | SEQ ID NO: 203 |
| SEQ ID NO: 39 | SEQ ID NO: 44 | SEQ ID NO: 204 |
| SEQ ID NO: 39 | SEQ ID NO: 44 | SEQ ID NO: 205 |
| SEQ ID NO: 39 | SEQ ID NO: 44 | SEQ ID NO: 206 |
| SEQ ID NO: 39 | SEQ ID NO: 44 | SEQ ID NO: 207 |
| SEQ ID NO: 39 | SEQ ID NO: 44 | SEQ ID NO: 208 |
| SEQ ID NO: 39 | SEQ ID NO: 44 | SEQ ID NO: 209 |
| SEQ ID NO: 39 | SEQ ID NO: 44 | SEQ ID NO: 210 |
| SEQ ID NO: 39 | SEQ ID NO: 44 | SEQ ID NO: 211 |
| SEQ ID NO: 39 | SEQ ID NO: 44 | SEQ ID NO: 212 |
| SEQ ID NO: 39 | SEQ ID NO: 44 | SEQ ID NO: 213 |
| SEQ ID NO: 39 | SEQ ID NO: 44 | SEQ ID NO: 214 |
| SEQ ID NO: 39 | SEQ ID NO: 44 | SEQ ID NO: 215 |
| SEQ ID NO: 39 | SEQ ID NO: 44 | SEQ ID NO: 216 |
| SEQ ID NO: 39 | SEQ ID NO: 44 | SEQ ID NO: 217 |
| SEQ ID NO: 39 | SEQ ID NO: 44 | SEQ ID NO: 218 |
| SEQ ID NO: 39 | SEQ ID NO: 44 | SEQ ID NO: 219 |
| SEQ ID NO: 39 | SEQ ID NO: 44 | SEQ ID NO: 220 |
| SEQ ID NO: 39 | SEQ ID NO: 44 | SEQ ID NO: 221 |
| SEQ ID NO: 41 | SEQ ID NO: 44 | SEQ ID NO: 120 |
| SEQ ID NO: 41 | SEQ ID NO: 44 | SEQ ID NO: 121 |
| SEQ ID NO: 41 | SEQ ID NO: 44 | SEQ ID NO: 122 |
| SEQ ID NO: 41 | SEQ ID NO: 44 | SEQ ID NO: 123 |
| SEQ ID NO: 41 | SEQ ID NO: 44 | SEQ ID NO: 124 |
| SEQ ID NO: 41 | SEQ ID NO: 44 | SEQ ID NO: 125 |
| SEQ ID NO: 41 | SEQ ID NO: 44 | SEQ ID NO: 126 |
| SEQ ID NO: 41 | SEQ ID NO: 44 | SEQ ID NO: 127 |
| SEQ ID NO: 41 | SEQ ID NO: 44 | SEQ ID NO: 128 |
| SEQ ID NO: 41 | SEQ ID NO: 44 | SEQ ID NO: 129 |
| SEQ ID NO: 41 | SEQ ID NO: 44 | SEQ ID NO: 130 |
| SEQ ID NO: 41 | SEQ ID NO: 44 | SEQ ID NO: 131 |
| SEQ ID NO: 41 | SEQ ID NO: 44 | SEQ ID NO: 132 |
| SEQ ID NO: 41 | SEQ ID NO: 44 | SEQ ID NO: 133 |
| SEQ ID NO: 41 | SEQ ID NO: 44 | SEQ ID NO: 134 |
| SEQ ID NO: 41 | SEQ ID NO: 44 | SEQ ID NO: 135 |
| SEQ ID NO: 41 | SEQ ID NO: 44 | SEQ ID NO: 136 |
| SEQ ID NO: 41 | SEQ ID NO: 44 | SEQ ID NO: 137 |
| SEQ ID NO: 41 | SEQ ID NO: 44 | SEQ ID NO: 138 |
| SEQ ID NO: 41 | SEQ ID NO: 44 | SEQ ID NO: 139 |
| SEQ ID NO: 41 | SEQ ID NO: 44 | SEQ ID NO: 140 |
| SEQ ID NO: 41 | SEQ ID NO: 44 | SEQ ID NO: 141 |
| SEQ ID NO: 41 | SEQ ID NO: 44 | SEQ ID NO: 142 |
| SEQ ID NO: 41 | SEQ ID NO: 44 | SEQ ID NO: 143 |
| SEQ ID NO: 41 | SEQ ID NO: 44 | SEQ ID NO: 144 |
| SEQ ID NO: 41 | SEQ ID NO: 44 | SEQ ID NO: 145 |
| SEQ ID NO: 41 | SEQ ID NO: 44 | SEQ ID NO: 146 |
| SEQ ID NO: 41 | SEQ ID NO: 44 | SEQ ID NO: 147 |
| SEQ ID NO: 41 | SEQ ID NO: 44 | SEQ ID NO: 148 |
| SEQ ID NO: 41 | SEQ ID NO: 44 | SEQ ID NO: 149 |
| SEQ ID NO: 41 | SEQ ID NO: 44 | SEQ ID NO: 150 |
| SEQ ID NO: 41 | SEQ ID NO: 44 | SEQ ID NO: 151 |
| SEQ ID NO: 41 | SEQ ID NO: 44 | SEQ ID NO: 152 |
| SEQ ID NO: 41 | SEQ ID NO: 44 | SEQ ID NO: 153 |
| SEQ ID NO: 41 | SEQ ID NO: 44 | SEQ ID NO: 154 |
| SEQ ID NO: 41 | SEQ ID NO: 44 | SEQ ID NO: 155 |
| SEQ ID NO: 41 | SEQ ID NO: 44 | SEQ ID NO: 156 |
| SEQ ID NO: 41 | SEQ ID NO: 44 | SEQ ID NO: 157 |
| SEQ ID NO: 41 | SEQ ID NO: 44 | SEQ ID NO: 158 |
| SEQ ID NO: 41 | SEQ ID NO: 44 | SEQ ID NO: 159 |
| SEQ ID NO: 41 | SEQ ID NO: 44 | SEQ ID NO: 160 |
| SEQ ID NO: 41 | SEQ ID NO: 44 | SEQ ID NO: 161 |
| SEQ ID NO: 41 | SEQ ID NO: 44 | SEQ ID NO: 162 |
| SEQ ID NO: 41 | SEQ ID NO: 44 | SEQ ID NO: 163 |
| SEQ ID NO: 41 | SEQ ID NO: 44 | SEQ ID NO: 164 |
| SEQ ID NO: 41 | SEQ ID NO: 44 | SEQ ID NO: 165 |
| SEQ ID NO: 41 | SEQ ID NO: 44 | SEQ ID NO: 166 |
| SEQ ID NO: 41 | SEQ ID NO: 44 | SEQ ID NO: 167 |
| SEQ ID NO: 41 | SEQ ID NO: 44 | SEQ ID NO: 168 |
| SEQ ID NO: 41 | SEQ ID NO: 44 | SEQ ID NO: 169 |
| SEQ ID NO: 41 | SEQ ID NO: 44 | SEQ ID NO: 170 |
| SEQ ID NO: 41 | SEQ ID NO: 44 | SEQ ID NO: 171 |
| SEQ ID NO: 41 | SEQ ID NO: 44 | SEQ ID NO: 172 |
| SEQ ID NO: 41 | SEQ ID NO: 44 | SEQ ID NO: 173 |
| SEQ ID NO: 41 | SEQ ID NO: 44 | SEQ ID NO: 174 |
| SEQ ID NO: 41 | SEQ ID NO: 44 | SEQ ID NO: 175 |
| SEQ ID NO: 41 | SEQ ID NO: 44 | SEQ ID NO: 176 |
| SEQ ID NO: 41 | SEQ ID NO: 44 | SEQ ID NO: 177 |
| SEQ ID NO: 41 | SEQ ID NO: 44 | SEQ ID NO: 178 |
| SEQ ID NO: 41 | SEQ ID NO: 44 | SEQ ID NO: 179 |
| SEQ ID NO: 41 | SEQ ID NO: 44 | SEQ ID NO: 180 |
| SEQ ID NO: 41 | SEQ ID NO: 44 | SEQ ID NO: 181 |
| SEQ ID NO: 41 | SEQ ID NO: 44 | SEQ ID NO: 182 |
| SEQ ID NO: 41 | SEQ ID NO: 44 | SEQ ID NO: 183 |
| SEQ ID NO: 41 | SEQ ID NO: 44 | SEQ ID NO: 184 |
| SEQ ID NO: 41 | SEQ ID NO: 44 | SEQ ID NO: 185 |
| SEQ ID NO: 41 | SEQ ID NO: 44 | SEQ ID NO: 186 |
| SEQ ID NO: 41 | SEQ ID NO: 44 | SEQ ID NO: 187 |
| SEQ ID NO: 41 | SEQ ID NO: 44 | SEQ ID NO: 188 |
| SEQ ID NO: 41 | SEQ ID NO: 44 | SEQ ID NO: 189 |
| SEQ ID NO: 41 | SEQ ID NO: 44 | SEQ ID NO: 190 |
| SEQ ID NO: 41 | SEQ ID NO: 44 | SEQ ID NO: 191 |
| SEQ ID NO: 41 | SEQ ID NO: 44 | SEQ ID NO: 192 |
| SEQ ID NO: 41 | SEQ ID NO: 44 | SEQ ID NO: 193 |
| SEQ ID NO: 41 | SEQ ID NO: 44 | SEQ ID NO: 194 |
| SEQ ID NO: 41 | SEQ ID NO: 44 | SEQ ID NO: 195 |
| SEQ ID NO: 41 | SEQ ID NO: 44 | SEQ ID NO: 196 |
| SEQ ID NO: 41 | SEQ ID NO: 44 | SEQ ID NO: 197 |
| SEQ ID NO: 41 | SEQ ID NO: 44 | SEQ ID NO: 198 |
| SEQ ID NO: 41 | SEQ ID NO: 44 | SEQ ID NO: 199 |
| SEQ ID NO: 41 | SEQ ID NO: 44 | SEQ ID NO: 200 |
| SEQ ID NO: 41 | SEQ ID NO: 44 | SEQ ID NO: 201 |
| SEQ ID NO: 41 | SEQ ID NO: 44 | SEQ ID NO: 202 |
| SEQ ID NO: 41 | SEQ ID NO: 44 | SEQ ID NO: 203 |
| SEQ ID NO: 41 | SEQ ID NO: 44 | SEQ ID NO: 204 |
| SEQ ID NO: 41 | SEQ ID NO: 44 | SEQ ID NO: 205 |
| SEQ ID NO: 41 | SEQ ID NO: 44 | SEQ ID NO: 206 |
| SEQ ID NO: 41 | SEQ ID NO: 44 | SEQ ID NO: 207 |
| SEQ ID NO: 41 | SEQ ID NO: 44 | SEQ ID NO: 208 |
| SEQ ID NO: 41 | SEQ ID NO: 44 | SEQ ID NO: 209 |
| SEQ ID NO: 41 | SEQ ID NO: 44 | SEQ ID NO: 210 |
| SEQ ID NO: 41 | SEQ ID NO: 44 | SEQ ID NO: 211 |
| SEQ ID NO: 41 | SEQ ID NO: 44 | SEQ ID NO: 212 |
| SEQ ID NO: 41 | SEQ ID NO: 44 | SEQ ID NO: 213 |
| SEQ ID NO: 41 | SEQ ID NO: 44 | SEQ ID NO: 214 |
| SEQ ID NO: 41 | SEQ ID NO: 44 | SEQ ID NO: 215 |
| SEQ ID NO: 41 | SEQ ID NO: 44 | SEQ ID NO: 216 |
| SEQ ID NO: 41 | SEQ ID NO: 44 | SEQ ID NO: 217 |
| SEQ ID NO: 41 | SEQ ID NO: 44 | SEQ ID NO: 218 |
| SEQ ID NO: 41 | SEQ ID NO: 44 | SEQ ID NO: 219 |
| SEQ ID NO: 41 | SEQ ID NO: 44 | SEQ ID NO: 220 |
| SEQ ID NO: 41 | SEQ ID NO: 44 | SEQ ID NO: 221 |
| SEQ ID NO: 43 | SEQ ID NO: 44 | SEQ ID NO: 120 |
| SEQ ID NO: 43 | SEQ ID NO: 44 | SEQ ID NO: 121 |
| SEQ ID NO: 43 | SEQ ID NO: 44 | SEQ ID NO: 122 |
| SEQ ID NO: 43 | SEQ ID NO: 44 | SEQ ID NO: 123 |
| SEQ ID NO: 43 | SEQ ID NO: 44 | SEQ ID NO: 124 |
| SEQ ID NO: 43 | SEQ ID NO: 44 | SEQ ID NO: 125 |
| SEQ ID NO: 43 | SEQ ID NO: 44 | SEQ ID NO: 126 |
| SEQ ID NO: 43 | SEQ ID NO: 44 | SEQ ID NO: 127 |
| SEQ ID NO: 43 | SEQ ID NO: 44 | SEQ ID NO: 128 |
| SEQ ID NO: 43 | SEQ ID NO: 44 | SEQ ID NO: 129 |
| SEQ ID NO: 43 | SEQ ID NO: 44 | SEQ ID NO: 130 |
| SEQ ID NO: 43 | SEQ ID NO: 44 | SEQ ID NO: 131 |
| SEQ ID NO: 43 | SEQ ID NO: 44 | SEQ ID NO: 132 |
| SEQ ID NO: 43 | SEQ ID NO: 44 | SEQ ID NO: 133 |
| SEQ ID NO: 43 | SEQ ID NO: 44 | SEQ ID NO: 134 |
| SEQ ID NO: 43 | SEQ ID NO: 44 | SEQ ID NO: 135 |
| SEQ ID NO: 43 | SEQ ID NO: 44 | SEQ ID NO: 136 |
| SEQ ID NO: 43 | SEQ ID NO: 44 | SEQ ID NO: 137 |
| SEQ ID NO: 43 | SEQ ID NO: 44 | SEQ ID NO: 138 |
| SEQ ID NO: 43 | SEQ ID NO: 44 | SEQ ID NO: 139 |
| SEQ ID NO: 43 | SEQ ID NO: 44 | SEQ ID NO: 140 |
| SEQ ID NO: 43 | SEQ ID NO: 44 | SEQ ID NO: 141 |
| SEQ ID NO: 43 | SEQ ID NO: 44 | SEQ ID NO: 142 |
| SEQ ID NO: 43 | SEQ ID NO: 44 | SEQ ID NO: 143 |
| SEQ ID NO: 43 | SEQ ID NO: 44 | SEQ ID NO: 144 |
| SEQ ID NO: 43 | SEQ ID NO: 44 | SEQ ID NO: 145 |
| SEQ ID NO: 43 | SEQ ID NO: 44 | SEQ ID NO: 146 |
| SEQ ID NO: 43 | SEQ ID NO: 44 | SEQ ID NO: 147 |
| SEQ ID NO: 43 | SEQ ID NO: 44 | SEQ ID NO: 148 |
| SEQ ID NO: 43 | SEQ ID NO: 44 | SEQ ID NO: 149 |
| SEQ ID NO: 43 | SEQ ID NO: 44 | SEQ ID NO: 150 |
| SEQ ID NO: 43 | SEQ ID NO: 44 | SEQ ID NO: 151 |
| SEQ ID NO: 43 | SEQ ID NO: 44 | SEQ ID NO: 152 |
| SEQ ID NO: 43 | SEQ ID NO: 44 | SEQ ID NO: 153 |
| SEQ ID NO: 43 | SEQ ID NO: 44 | SEQ ID NO: 154 |
| SEQ ID NO: 43 | SEQ ID NO: 44 | SEQ ID NO: 155 |
| SEQ ID NO: 43 | SEQ ID NO: 44 | SEQ ID NO: 156 |
| SEQ ID NO: 43 | SEQ ID NO: 44 | SEQ ID NO: 157 |
| SEQ ID NO: 43 | SEQ ID NO: 44 | SEQ ID NO: 158 |
| SEQ ID NO: 43 | SEQ ID NO: 44 | SEQ ID NO: 159 |
| SEQ ID NO: 43 | SEQ ID NO: 44 | SEQ ID NO: 160 |
| SEQ ID NO: 43 | SEQ ID NO: 44 | SEQ ID NO: 161 |
| SEQ ID NO: 43 | SEQ ID NO: 44 | SEQ ID NO: 162 |
| SEQ ID NO: 43 | SEQ ID NO: 44 | SEQ ID NO: 163 |
| SEQ ID NO: 43 | SEQ ID NO: 44 | SEQ ID NO: 164 |
| SEQ ID NO: 43 | SEQ ID NO: 44 | SEQ ID NO: 165 |
| SEQ ID NO: 43 | SEQ ID NO: 44 | SEQ ID NO: 166 |
| SEQ ID NO: 43 | SEQ ID NO: 44 | SEQ ID NO: 167 |
| SEQ ID NO: 43 | SEQ ID NO: 44 | SEQ ID NO: 168 |
| SEQ ID NO: 43 | SEQ ID NO: 44 | SEQ ID NO: 169 |
| SEQ ID NO: 43 | SEQ ID NO: 44 | SEQ ID NO: 170 |
| SEQ ID NO: 43 | SEQ ID NO: 44 | SEQ ID NO: 171 |
| SEQ ID NO: 43 | SEQ ID NO: 44 | SEQ ID NO: 172 |
| SEQ ID NO: 43 | SEQ ID NO: 44 | SEQ ID NO: 173 |
| SEQ ID NO: 43 | SEQ ID NO: 44 | SEQ ID NO: 174 |
| SEQ ID NO: 43 | SEQ ID NO: 44 | SEQ ID NO: 175 |
| SEQ ID NO: 43 | SEQ ID NO: 44 | SEQ ID NO: 176 |
| SEQ ID NO: 43 | SEQ ID NO: 44 | SEQ ID NO: 177 |
| SEQ ID NO: 43 | SEQ ID NO: 44 | SEQ ID NO: 178 |
| SEQ ID NO: 43 | SEQ ID NO: 44 | SEQ ID NO: 179 |
| SEQ ID NO: 43 | SEQ ID NO: 44 | SEQ ID NO: 180 |
| SEQ ID NO: 43 | SEQ ID NO: 44 | SEQ ID NO: 181 |
| SEQ ID NO: 43 | SEQ ID NO: 44 | SEQ ID NO: 182 |
| SEQ ID NO: 43 | SEQ ID NO: 44 | SEQ ID NO: 183 |
| SEQ ID NO: 43 | SEQ ID NO: 44 | SEQ ID NO: 184 |
| SEQ ID NO: 43 | SEQ ID NO: 44 | SEQ ID NO: 185 |
| SEQ ID NO: 43 | SEQ ID NO: 44 | SEQ ID NO: 186 |
| SEQ ID NO: 43 | SEQ ID NO: 44 | SEQ ID NO: 187 |
| SEQ ID NO: 43 | SEQ ID NO: 44 | SEQ ID NO: 188 |
| SEQ ID NO: 43 | SEQ ID NO: 44 | SEQ ID NO: 189 |
| SEQ ID NO: 43 | SEQ ID NO: 44 | SEQ ID NO: 190 |
| SEQ ID NO: 43 | SEQ ID NO: 44 | SEQ ID NO: 191 |
| SEQ ID NO: 43 | SEQ ID NO: 44 | SEQ ID NO: 192 |
| SEQ ID NO: 43 | SEQ ID NO: 44 | SEQ ID NO: 193 |
| SEQ ID NO: 43 | SEQ ID NO: 44 | SEQ ID NO: 194 |
| SEQ ID NO: 43 | SEQ ID NO: 44 | SEQ ID NO: 195 |
| SEQ ID NO: 43 | SEQ ID NO: 44 | SEQ ID NO: 196 |
| SEQ ID NO: 43 | SEQ ID NO: 44 | SEQ ID NO: 197 |
| SEQ ID NO: 43 | SEQ ID NO: 44 | SEQ ID NO: 198 |
| SEQ ID NO: 43 | SEQ ID NO: 44 | SEQ ID NO: 199 |
| SEQ ID NO: 43 | SEQ ID NO: 44 | SEQ ID NO: 200 |
| SEQ ID NO: 43 | SEQ ID NO: 44 | SEQ ID NO: 201 |
| SEQ ID NO: 43 | SEQ ID NO: 44 | SEQ ID NO: 202 |
| SEQ ID NO: 43 | SEQ ID NO: 44 | SEQ ID NO: 203 |
| SEQ ID NO: 43 | SEQ ID NO: 44 | SEQ ID NO: 204 |
| SEQ ID NO: 43 | SEQ ID NO: 44 | SEQ ID NO: 205 |
| SEQ ID NO: 43 | SEQ ID NO: 44 | SEQ ID NO: 206 |
| SEQ ID NO: 43 | SEQ ID NO: 44 | SEQ ID NO: 207 |
| SEQ ID NO: 43 | SEQ ID NO: 44 | SEQ ID NO: 208 |
| SEQ ID NO: 43 | SEQ ID NO: 44 | SEQ ID NO: 209 |
| SEQ ID NO: 43 | SEQ ID NO: 44 | SEQ ID NO: 210 |
| SEQ ID NO: 43 | SEQ ID NO: 44 | SEQ ID NO: 211 |
| SEQ ID NO: 43 | SEQ ID NO: 44 | SEQ ID NO: 212 |
| SEQ ID NO: 43 | SEQ ID NO: 44 | SEQ ID NO: 213 |
| SEQ ID NO: 43 | SEQ ID NO: 44 | SEQ ID NO: 214 |
| SEQ ID NO: 43 | SEQ ID NO: 44 | SEQ ID NO: 215 |
| SEQ ID NO: 43 | SEQ ID NO: 44 | SEQ ID NO: 216 |
| SEQ ID NO: 43 | SEQ ID NO: 44 | SEQ ID NO: 217 |
| SEQ ID NO: 43 | SEQ ID NO: 44 | SEQ ID NO: 218 |
| SEQ ID NO: 43 | SEQ ID NO: 44 | SEQ ID NO: 219 |
| SEQ ID NO: 43 | SEQ ID NO: 44 | SEQ ID NO: 220 |
| SEQ ID NO: 43 | SEQ ID NO: 44 | SEQ ID NO: 221 |
| SEQ ID NO: 43 | SEQ ID NO: 44 | SEQ ID NO: 329 |
| SEQ ID NO: 43 | SEQ ID NO: 44 | SEQ ID NO: 332 |
| SEQ ID NO: 43 | SEQ ID NO: 44 | SEQ ID NO: 335 |

TABLE 7
Example configurations of fusion proteins
Components (from an N-terminus to C-terminus direction)

| Heterologous | | Mutant Soluble |
|---|---|---|
| Protein | Linker(s) | ActRIIB-ECD polypeptide |
| SEQ ID NO: 39 | SEQ ID NO: 118 | SEQ ID NO: 119 |
| SEQ ID NO: 39 | SEQ ID NO: 118 | SEQ ID NO: 120 |
| SEQ ID NO: 39 | SEQ ID NO: 118 | SEQ ID NO: 121 |
| SEQ ID NO: 39 | SEQ ID NO: 118 | SEQ ID NO: 122 |
| SEQ ID NO: 39 | SEQ ID NO: 118 | SEQ ID NO: 123 |
| SEQ ID NO: 39 | SEQ ID NO: 118 | SEQ ID NO: 124 |
| SEQ ID NO: 39 | SEQ ID NO: 118 | SEQ ID NO: 125 |
| SEQ ID NO: 39 | SEQ ID NO: 118 | SEQ ID NO: 126 |
| SEQ ID NO: 39 | SEQ ID NO: 118 | SEQ ID NO: 127 |
| SEQ ID NO: 39 | SEQ ID NO: 118 | SEQ ID NO: 128 |
| SEQ ID NO: 39 | SEQ ID NO: 118 | SEQ ID NO: 129 |
| SEQ ID NO: 39 | SEQ ID NO: 118 | SEQ ID NO: 130 |
| SEQ ID NO: 39 | SEQ ID NO: 118 | SEQ ID NO: 131 |
| SEQ ID NO: 39 | SEQ ID NO: 118 | SEQ ID NO: 132 |
| SEQ ID NO: 39 | SEQ ID NO: 118 | SEQ ID NO: 133 |
| SEQ ID NO: 39 | SEQ ID NO: 118 | SEQ ID NO: 134 |
| SEQ ID NO: 39 | SEQ ID NO: 118 | SEQ ID NO: 135 |
| SEQ ID NO: 39 | SEQ ID NO: 118 | SEQ ID NO: 136 |
| SEQ ID NO: 39 | SEQ ID NO: 118 | SEQ ID NO: 137 |
| SEQ ID NO: 39 | SEQ ID NO: 118 | SEQ ID NO: 138 |
| SEQ ID NO: 39 | SEQ ID NO: 118 | SEQ ID NO: 139 |
| SEQ ID NO: 39 | SEQ ID NO: 118 | SEQ ID NO: 140 |
| SEQ ID NO: 39 | SEQ ID NO: 118 | SEQ ID NO: 141 |
| SEQ ID NO: 39 | SEQ ID NO: 118 | SEQ ID NO: 142 |
| SEQ ID NO: 39 | SEQ ID NO: 118 | SEQ ID NO: 143 |
| SEQ ID NO: 39 | SEQ ID NO: 118 | SEQ ID NO: 144 |
| SEQ ID NO: 39 | SEQ ID NO: 118 | SEQ ID NO: 145 |
| SEQ ID NO: 39 | SEQ ID NO: 118 | SEQ ID NO: 146 |
| SEQ ID NO: 39 | SEQ ID NO: 118 | SEQ ID NO: 147 |
| SEQ ID NO: 39 | SEQ ID NO: 118 | SEQ ID NO: 148 |
| SEQ ID NO: 39 | SEQ ID NO: 118 | SEQ ID NO: 149 |
| SEQ ID NO: 39 | SEQ ID NO: 118 | SEQ ID NO: 150 |
| SEQ ID NO: 39 | SEQ ID NO: 118 | SEQ ID NO: 151 |
| SEQ ID NO: 39 | SEQ ID NO: 118 | SEQ ID NO: 152 |
| SEQ ID NO: 39 | SEQ ID NO: 118 | SEQ ID NO: 153 |
| SEQ ID NO: 39 | SEQ ID NO: 118 | SEQ ID NO: 154 |
| SEQ ID NO: 39 | SEQ ID NO: 118 | SEQ ID NO: 155 |
| SEQ ID NO: 39 | SEQ ID NO: 118 | SEQ ID NO: 156 |
| SEQ ID NO: 39 | SEQ ID NO: 118 | SEQ ID NO: 157 |
| SEQ ID NO: 39 | SEQ ID NO: 118 | SEQ ID NO: 158 |
| SEQ ID NO: 39 | SEQ ID NO: 118 | SEQ ID NO: 159 |
| SEQ ID NO: 39 | SEQ ID NO: 118 | SEQ ID NO: 160 |
| SEQ ID NO: 39 | SEQ ID NO: 118 | SEQ ID NO: 161 |
| SEQ ID NO: 39 | SEQ ID NO: 118 | SEQ ID NO: 162 |
| SEQ ID NO: 39 | SEQ ID NO: 118 | SEQ ID NO: 163 |
| SEQ ID NO: 39 | SEQ ID NO: 118 | SEQ ID NO: 164 |
| SEQ ID NO: 39 | SEQ ID NO: 118 | SEQ ID NO: 165 |
| SEQ ID NO: 39 | SEQ ID NO: 118 | SEQ ID NO: 166 |
| SEQ ID NO: 39 | SEQ ID NO: 118 | SEQ ID NO: 167 |
| SEQ ID NO: 39 | SEQ ID NO: 118 | SEQ ID NO: 168 |
| SEQ ID NO: 39 | SEQ ID NO: 118 | SEQ ID NO: 169 |
| SEQ ID NO: 39 | SEQ ID NO: 118 | SEQ ID NO: 170 |
| SEQ ID NO: 39 | SEQ ID NO: 118 | SEQ ID NO: 171 |
| SEQ ID NO: 39 | SEQ ID NO: 118 | SEQ ID NO: 172 |
| SEQ ID NO: 39 | SEQ ID NO: 118 | SEQ ID NO: 173 |
| SEQ ID NO: 39 | SEQ ID NO: 118 | SEQ ID NO: 174 |
| SEQ ID NO: 39 | SEQ ID NO: 118 | SEQ ID NO: 175 |
| SEQ ID NO: 39 | SEQ ID NO: 118 | SEQ ID NO: 176 |
| SEQ ID NO: 39 | SEQ ID NO: 118 | SEQ ID NO: 177 |
| SEQ ID NO: 39 | SEQ ID NO: 118 | SEQ ID NO: 178 |
| SEQ ID NO: 39 | SEQ ID NO: 118 | SEQ ID NO: 179 |
| SEQ ID NO: 39 | SEQ ID NO: 118 | SEQ ID NO: 180 |
| SEQ ID NO: 39 | SEQ ID NO: 118 | SEQ ID NO: 181 |
| SEQ ID NO: 39 | SEQ ID NO: 118 | SEQ ID NO: 182 |
| SEQ ID NO: 39 | SEQ ID NO: 118 | SEQ ID NO: 183 |
| SEQ ID NO: 39 | SEQ ID NO: 118 | SEQ ID NO: 184 |
| SEQ ID NO: 39 | SEQ ID NO: 118 | SEQ ID NO: 185 |
| SEQ ID NO: 39 | SEQ ID NO: 118 | SEQ ID NO: 186 |
| SEQ ID NO: 39 | SEQ ID NO: 118 | SEQ ID NO: 187 |
| SEQ ID NO: 39 | SEQ ID NO: 118 | SEQ ID NO: 188 |
| SEQ ID NO: 39 | SEQ ID NO: 118 | SEQ ID NO: 189 |
| SEQ ID NO: 39 | SEQ ID NO: 118 | SEQ ID NO: 190 |
| SEQ ID NO: 39 | SEQ ID NO: 118 | SEQ ID NO: 191 |
| SEQ ID NO: 39 | SEQ ID NO: 118 | SEQ ID NO: 192 |
| SEQ ID NO: 39 | SEQ ID NO: 118 | SEQ ID NO: 193 |
| SEQ ID NO: 39 | SEQ ID NO: 118 | SEQ ID NO: 194 |
| SEQ ID NO: 39 | SEQ ID NO: 118 | SEQ ID NO: 195 |
| SEQ ID NO: 39 | SEQ ID NO: 118 | SEQ ID NO: 196 |
| SEQ ID NO: 39 | SEQ ID NO: 118 | SEQ ID NO: 197 |
| SEQ ID NO: 39 | SEQ ID NO: 118 | SEQ ID NO: 198 |
| SEQ ID NO: 39 | SEQ ID NO: 118 | SEQ ID NO: 199 |
| SEQ ID NO: 39 | SEQ ID NO: 118 | SEQ ID NO: 200 |
| SEQ ID NO: 39 | SEQ ID NO: 118 | SEQ ID NO: 201 |
| SEQ ID NO: 39 | SEQ ID NO: 118 | SEQ ID NO: 202 |
| SEQ ID NO: 39 | SEQ ID NO: 118 | SEQ ID NO: 203 |
| SEQ ID NO: 39 | SEQ ID NO: 118 | SEQ ID NO: 204 |
| SEQ ID NO: 39 | SEQ ID NO: 118 | SEQ ID NO: 205 |
| SEQ ID NO: 39 | SEQ ID NO: 118 | SEQ ID NO: 206 |
| SEQ ID NO: 39 | SEQ ID NO: 118 | SEQ ID NO: 207 |
| SEQ ID NO: 39 | SEQ ID NO: 118 | SEQ ID NO: 208 |
| SEQ ID NO: 39 | SEQ ID NO: 118 | SEQ ID NO: 209 |
| SEQ ID NO: 39 | SEQ ID NO: 118 | SEQ ID NO: 210 |
| SEQ ID NO: 39 | SEQ ID NO: 118 | SEQ ID NO: 211 |
| SEQ ID NO: 39 | SEQ ID NO: 118 | SEQ ID NO: 212 |
| SEQ ID NO: 39 | SEQ ID NO: 118 | SEQ ID NO: 213 |
| SEQ ID NO: 39 | SEQ ID NO: 118 | SEQ ID NO: 214 |
| SEQ ID NO: 39 | SEQ ID NO: 118 | SEQ ID NO: 215 |
| SEQ ID NO: 39 | SEQ ID NO: 118 | SEQ ID NO: 216 |
| SEQ ID NO: 39 | SEQ ID NO: 118 | SEQ ID NO: 217 |
| SEQ ID NO: 39 | SEQ ID NO: 118 | SEQ ID NO: 218 |
| SEQ ID NO: 39 | SEQ ID NO: 118 | SEQ ID NO: 219 |
| SEQ ID NO: 39 | SEQ ID NO: 118 | SEQ ID NO: 220 |
| SEQ ID NO: 39 | SEQ ID NO: 118 | SEQ ID NO: 221 |
| SEQ ID NO: 41 | SEQ ID NO: 118 | SEQ ID NO: 120 |
| SEQ ID NO: 41 | SEQ ID NO: 118 | SEQ ID NO: 121 |
| SEQ ID NO: 41 | SEQ ID NO: 118 | SEQ ID NO: 122 |
| SEQ ID NO: 41 | SEQ ID NO: 118 | SEQ ID NO: 123 |
| SEQ ID NO: 41 | SEQ ID NO: 118 | SEQ ID NO: 124 |
| SEQ ID NO: 41 | SEQ ID NO: 118 | SEQ ID NO: 125 |
| SEQ ID NO: 41 | SEQ ID NO: 118 | SEQ ID NO: 126 |
| SEQ ID NO: 41 | SEQ ID NO: 118 | SEQ ID NO: 127 |
| SEQ ID NO: 41 | SEQ ID NO: 118 | SEQ ID NO: 128 |
| SEQ ID NO: 41 | SEQ ID NO: 118 | SEQ ID NO: 129 |
| SEQ ID NO: 41 | SEQ ID NO: 118 | SEQ ID NO: 130 |
| SEQ ID NO: 41 | SEQ ID NO: 118 | SEQ ID NO: 131 |
| SEQ ID NO: 41 | SEQ ID NO: 118 | SEQ ID NO: 132 |
| SEQ ID NO: 41 | SEQ ID NO: 118 | SEQ ID NO: 133 |
| SEQ ID NO: 41 | SEQ ID NO: 118 | SEQ ID NO: 134 |
| SEQ ID NO: 41 | SEQ ID NO: 118 | SEQ ID NO: 135 |
| SEQ ID NO: 41 | SEQ ID NO: 118 | SEQ ID NO: 136 |
| SEQ ID NO: 41 | SEQ ID NO: 118 | SEQ ID NO: 137 |
| SEQ ID NO: 41 | SEQ ID NO: 118 | SEQ ID NO: 138 |
| SEQ ID NO: 41 | SEQ ID NO: 118 | SEQ ID NO: 139 |
| SEQ ID NO: 41 | SEQ ID NO: 118 | SEQ ID NO: 140 |
| SEQ ID NO: 41 | SEQ ID NO: 118 | SEQ ID NO: 141 |
| SEQ ID NO: 41 | SEQ ID NO: 118 | SEQ ID NO: 142 |
| SEQ ID NO: 41 | SEQ ID NO: 118 | SEQ ID NO: 143 |
| SEQ ID NO: 41 | SEQ ID NO: 118 | SEQ ID NO: 144 |
| SEQ ID NO: 41 | SEQ ID NO: 118 | SEQ ID NO: 145 |
| SEQ ID NO: 41 | SEQ ID NO: 118 | SEQ ID NO: 146 |
| SEQ ID NO: 41 | SEQ ID NO: 118 | SEQ ID NO: 147 |
| SEQ ID NO: 41 | SEQ ID NO: 118 | SEQ ID NO: 148 |
| SEQ ID NO: 41 | SEQ ID NO: 118 | SEQ ID NO: 149 |
| SEQ ID NO: 41 | SEQ ID NO: 118 | SEQ ID NO: 150 |
| SEQ ID NO: 41 | SEQ ID NO: 118 | SEQ ID NO: 151 |
| SEQ ID NO: 41 | SEQ ID NO: 118 | SEQ ID NO: 152 |
| SEQ ID NO: 41 | SEQ ID NO: 118 | SEQ ID NO: 153 |
| SEQ ID NO: 41 | SEQ ID NO: 118 | SEQ ID NO: 154 |
| SEQ ID NO: 41 | SEQ ID NO: 118 | SEQ ID NO: 155 |
| SEQ ID NO: 41 | SEQ ID NO: 118 | SEQ ID NO: 156 |
| SEQ ID NO: 41 | SEQ ID NO: 118 | SEQ ID NO: 157 |
| SEQ ID NO: 41 | SEQ ID NO: 118 | SEQ ID NO: 158 |
| SEQ ID NO: 41 | SEQ ID NO: 118 | SEQ ID NO: 159 |
| SEQ ID NO: 41 | SEQ ID NO: 118 | SEQ ID NO: 160 |
| SEQ ID NO: 41 | SEQ ID NO: 118 | SEQ ID NO: 161 |
| SEQ ID NO: 41 | SEQ ID NO: 118 | SEQ ID NO: 162 |
| SEQ ID NO: 41 | SEQ ID NO: 118 | SEQ ID NO: 163 |
| SEQ ID NO: 41 | SEQ ID NO: 118 | SEQ ID NO: 164 |
| SEQ ID NO: 41 | SEQ ID NO: 118 | SEQ ID NO: 165 |
| SEQ ID NO: 41 | SEQ ID NO: 118 | SEQ ID NO: 166 |
| SEQ ID NO: 41 | SEQ ID NO: 118 | SEQ ID NO: 167 |
| SEQ ID NO: 41 | SEQ ID NO: 118 | SEQ ID NO: 168 |
| SEQ ID NO: 41 | SEQ ID NO: 118 | SEQ ID NO: 169 |
| SEQ ID NO: 41 | SEQ ID NO: 118 | SEQ ID NO: 170 |
| SEQ ID NO: 41 | SEQ ID NO: 118 | SEQ ID NO: 171 |
| SEQ ID NO: 41 | SEQ ID NO: 118 | SEQ ID NO: 172 |
| SEQ ID NO: 41 | SEQ ID NO: 118 | SEQ ID NO: 173 |
| SEQ ID NO: 41 | SEQ ID NO: 118 | SEQ ID NO: 174 |
| SEQ ID NO: 41 | SEQ ID NO: 118 | SEQ ID NO: 175 |
| SEQ ID NO: 41 | SEQ ID NO: 118 | SEQ ID NO: 176 |
| SEQ ID NO: 41 | SEQ ID NO: 118 | SEQ ID NO: 177 |
| SEQ ID NO: 41 | SEQ ID NO: 118 | SEQ ID NO: 178 |
| SEQ ID NO: 41 | SEQ ID NO: 118 | SEQ ID NO: 179 |
| SEQ ID NO: 41 | SEQ ID NO: 118 | SEQ ID NO: 180 |
| SEQ ID NO: 41 | SEQ ID NO: 118 | SEQ ID NO: 181 |
| SEQ ID NO: 41 | SEQ ID NO: 118 | SEQ ID NO: 182 |
| SEQ ID NO: 41 | SEQ ID NO: 118 | SEQ ID NO: 183 |
| SEQ ID NO: 41 | SEQ ID NO: 118 | SEQ ID NO: 184 |
| SEQ ID NO: 41 | SEQ ID NO: 118 | SEQ ID NO: 185 |
| SEQ ID NO: 41 | SEQ ID NO: 118 | SEQ ID NO: 186 |
| SEQ ID NO: 41 | SEQ ID NO: 118 | SEQ ID NO: 187 |
| SEQ ID NO: 41 | SEQ ID NO: 118 | SEQ ID NO: 188 |
| SEQ ID NO: 41 | SEQ ID NO: 118 | SEQ ID NO: 189 |
| SEQ ID NO: 41 | SEQ ID NO: 118 | SEQ ID NO: 190 |
| SEQ ID NO: 41 | SEQ ID NO: 118 | SEQ ID NO: 191 |
| SEQ ID NO: 41 | SEQ ID NO: 118 | SEQ ID NO: 192 |
| SEQ ID NO: 41 | SEQ ID NO: 118 | SEQ ID NO: 193 |
| SEQ ID NO: 41 | SEQ ID NO: 118 | SEQ ID NO: 194 |
| SEQ ID NO: 41 | SEQ ID NO: 118 | SEQ ID NO: 195 |
| SEQ ID NO: 41 | SEQ ID NO: 118 | SEQ ID NO: 196 |
| SEQ ID NO: 41 | SEQ ID NO: 118 | SEQ ID NO: 197 |
| SEQ ID NO: 41 | SEQ ID NO: 118 | SEQ ID NO: 198 |
| SEQ ID NO: 41 | SEQ ID NO: 118 | SEQ ID NO: 199 |
| SEQ ID NO: 41 | SEQ ID NO: 118 | SEQ ID NO: 200 |
| SEQ ID NO: 41 | SEQ ID NO: 118 | SEQ ID NO: 201 |
| SEQ ID NO: 41 | SEQ ID NO: 118 | SEQ ID NO: 202 |
| SEQ ID NO: 41 | SEQ ID NO: 118 | SEQ ID NO: 203 |
| SEQ ID NO: 41 | SEQ ID NO: 118 | SEQ ID NO: 204 |
| SEQ ID NO: 41 | SEQ ID NO: 118 | SEQ ID NO: 205 |
| SEQ ID NO: 41 | SEQ ID NO: 118 | SEQ ID NO: 206 |
| SEQ ID NO: 41 | SEQ ID NO: 118 | SEQ ID NO: 207 |
| SEQ ID NO: 41 | SEQ ID NO: 118 | SEQ ID NO: 208 |
| SEQ ID NO: 41 | SEQ ID NO: 118 | SEQ ID NO: 209 |
| SEQ ID NO: 41 | SEQ ID NO: 118 | SEQ ID NO: 210 |
| SEQ ID NO: 41 | SEQ ID NO: 118 | SEQ ID NO: 211 |
| SEQ ID NO: 41 | SEQ ID NO: 118 | SEQ ID NO: 212 |
| SEQ ID NO: 41 | SEQ ID NO: 118 | SEQ ID NO: 213 |
| SEQ ID NO: 41 | SEQ ID NO: 118 | SEQ ID NO: 214 |
| SEQ ID NO: 41 | SEQ ID NO: 118 | SEQ ID NO: 215 |
| SEQ ID NO: 41 | SEQ ID NO: 118 | SEQ ID NO: 216 |
| SEQ ID NO: 41 | SEQ ID NO: 118 | SEQ ID NO: 217 |
| SEQ ID NO: 41 | SEQ ID NO: 118 | SEQ ID NO: 218 |
| SEQ ID NO: 41 | SEQ ID NO: 118 | SEQ ID NO: 219 |
| SEQ ID NO: 41 | SEQ ID NO: 118 | SEQ ID NO: 220 |
| SEQ ID NO: 41 | SEQ ID NO: 118 | SEQ ID NO: 221 |
| SEQ ID NO: 43 | SEQ ID NO: 118 | SEQ ID NO: 120 |
| SEQ ID NO: 43 | SEQ ID NO: 118 | SEQ ID NO: 121 |
| SEQ ID NO: 43 | SEQ ID NO: 118 | SEQ ID NO: 122 |
| SEQ ID NO: 43 | SEQ ID NO: 118 | SEQ ID NO: 123 |
| SEQ ID NO: 43 | SEQ ID NO: 118 | SEQ ID NO: 124 |
| SEQ ID NO: 43 | SEQ ID NO: 118 | SEQ ID NO: 125 |
| SEQ ID NO: 43 | SEQ ID NO: 118 | SEQ ID NO: 126 |
| SEQ ID NO: 43 | SEQ ID NO: 118 | SEQ ID NO: 127 |
| SEQ ID NO: 43 | SEQ ID NO: 118 | SEQ ID NO: 128 |
| SEQ ID NO: 43 | SEQ ID NO: 118 | SEQ ID NO: 129 |
| SEQ ID NO: 43 | SEQ ID NO: 118 | SEQ ID NO: 130 |
| SEQ ID NO: 43 | SEQ ID NO: 118 | SEQ ID NO: 131 |
| SEQ ID NO: 43 | SEQ ID NO: 118 | SEQ ID NO: 132 |
| SEQ ID NO: 43 | SEQ ID NO: 118 | SEQ ID NO: 133 |
| SEQ ID NO: 43 | SEQ ID NO: 118 | SEQ ID NO: 134 |
| SEQ ID NO: 43 | SEQ ID NO: 118 | SEQ ID NO: 135 |
| SEQ ID NO: 43 | SEQ ID NO: 118 | SEQ ID NO: 136 |
| SEQ ID NO: 43 | SEQ ID NO: 118 | SEQ ID NO: 137 |
| SEQ ID NO: 43 | SEQ ID NO: 118 | SEQ ID NO: 138 |
| SEQ ID NO: 43 | SEQ ID NO: 118 | SEQ ID NO: 139 |
| SEQ ID NO: 43 | SEQ ID NO: 118 | SEQ ID NO: 140 |
| SEQ ID NO: 43 | SEQ ID NO: 118 | SEQ ID NO: 141 |
| SEQ ID NO: 43 | SEQ ID NO: 118 | SEQ ID NO: 142 |
| SEQ ID NO: 43 | SEQ ID NO: 118 | SEQ ID NO: 143 |
| SEQ ID NO: 43 | SEQ ID NO: 118 | SEQ ID NO: 144 |
| SEQ ID NO: 43 | SEQ ID NO: 118 | SEQ ID NO: 145 |
| SEQ ID NO: 43 | SEQ ID NO: 118 | SEQ ID NO: 146 |
| SEQ ID NO: 43 | SEQ ID NO: 118 | SEQ ID NO: 147 |
| SEQ ID NO: 43 | SEQ ID NO: 118 | SEQ ID NO: 148 |
| SEQ ID NO: 43 | SEQ ID NO: 118 | SEQ ID NO: 149 |
| SEQ ID NO: 43 | SEQ ID NO: 118 | SEQ ID NO: 150 |
| SEQ ID NO: 43 | SEQ ID NO: 118 | SEQ ID NO: 151 |
| SEQ ID NO: 43 | SEQ ID NO: 118 | SEQ ID NO: 152 |
| SEQ ID NO: 43 | SEQ ID NO: 118 | SEQ ID NO: 153 |
| SEQ ID NO: 43 | SEQ ID NO: 118 | SEQ ID NO: 154 |
| SEQ ID NO: 43 | SEQ ID NO: 118 | SEQ ID NO: 155 |
| SEQ ID NO: 43 | SEQ ID NO: 118 | SEQ ID NO: 156 |
| SEQ ID NO: 43 | SEQ ID NO: 118 | SEQ ID NO: 157 |
| SEQ ID NO: 43 | SEQ ID NO: 118 | SEQ ID NO: 158 |
| SEQ ID NO: 43 | SEQ ID NO: 118 | SEQ ID NO: 159 |
| SEQ ID NO: 43 | SEQ ID NO: 118 | SEQ ID NO: 160 |
| SEQ ID NO: 43 | SEQ ID NO: 118 | SEQ ID NO: 161 |
| SEQ ID NO: 43 | SEQ ID NO: 118 | SEQ ID NO: 162 |
| SEQ ID NO: 43 | SEQ ID NO: 118 | SEQ ID NO: 163 |
| SEQ ID NO: 43 | SEQ ID NO: 118 | SEQ ID NO: 164 |
| SEQ ID NO: 43 | SEQ ID NO: 118 | SEQ ID NO: 165 |
| SEQ ID NO: 43 | SEQ ID NO: 118 | SEQ ID NO: 166 |
| SEQ ID NO: 43 | SEQ ID NO: 118 | SEQ ID NO: 167 |
| SEQ ID NO: 43 | SEQ ID NO: 118 | SEQ ID NO: 168 |
| SEQ ID NO: 43 | SEQ ID NO: 118 | SEQ ID NO: 169 |
| SEQ ID NO: 43 | SEQ ID NO: 118 | SEQ ID NO: 170 |
| SEQ ID NO: 43 | SEQ ID NO: 118 | SEQ ID NO: 171 |
| SEQ ID NO: 43 | SEQ ID NO: 118 | SEQ ID NO: 172 |
| SEQ ID NO: 43 | SEQ ID NO: 118 | SEQ ID NO: 173 |
| SEQ ID NO: 43 | SEQ ID NO: 118 | SEQ ID NO: 174 |
| SEQ ID NO: 43 | SEQ ID NO: 118 | SEQ ID NO: 175 |
| SEQ ID NO: 43 | SEQ ID NO: 118 | SEQ ID NO: 176 |
| SEQ ID NO: 43 | SEQ ID NO: 118 | SEQ ID NO: 177 |
| SEQ ID NO: 43 | SEQ ID NO: 118 | SEQ ID NO: 178 |
| SEQ ID NO: 43 | SEQ ID NO: 118 | SEQ ID NO: 179 |
| SEQ ID NO: 43 | SEQ ID NO: 118 | SEQ ID NO: 180 |
| SEQ ID NO: 43 | SEQ ID NO: 118 | SEQ ID NO: 181 |
| SEQ ID NO: 43 | SEQ ID NO: 118 | SEQ ID NO: 182 |
| SEQ ID NO: 43 | SEQ ID NO: 118 | SEQ ID NO: 183 |
| SEQ ID NO: 43 | SEQ ID NO: 118 | SEQ ID NO: 184 |
| SEQ ID NO: 43 | SEQ ID NO: 118 | SEQ ID NO: 185 |
| SEQ ID NO: 43 | SEQ ID NO: 118 | SEQ ID NO: 186 |
| SEQ ID NO: 43 | SEQ ID NO: 118 | SEQ ID NO: 187 |
| SEQ ID NO: 43 | SEQ ID NO: 118 | SEQ ID NO: 188 |
| SEQ ID NO: 43 | SEQ ID NO: 118 | SEQ ID NO: 189 |
| SEQ ID NO: 43 | SEQ ID NO: 118 | SEQ ID NO: 190 |
| SEQ ID NO: 43 | SEQ ID NO: 118 | SEQ ID NO: 191 |
| SEQ ID NO: 43 | SEQ ID NO: 118 | SEQ ID NO: 192 |
| SEQ ID NO: 43 | SEQ ID NO: 118 | SEQ ID NO: 193 |
| SEQ ID NO: 43 | SEQ ID NO: 118 | SEQ ID NO: 194 |
| SEQ ID NO: 43 | SEQ ID NO: 118 | SEQ ID NO: 195 |
| SEQ ID NO: 43 | SEQ ID NO: 118 | SEQ ID NO: 196 |
| SEQ ID NO: 43 | SEQ ID NO: 118 | SEQ ID NO: 197 |
| SEQ ID NO: 43 | SEQ ID NO: 118 | SEQ ID NO: 198 |
| SEQ ID NO: 43 | SEQ ID NO: 118 | SEQ ID NO: 199 |
| SEQ ID NO: 43 | SEQ ID NO: 118 | SEQ ID NO: 200 |
| SEQ ID NO: 43 | SEQ ID NO: 118 | SEQ ID NO: 201 |
| SEQ ID NO: 43 | SEQ ID NO: 118 | SEQ ID NO: 202 |
| SEQ ID NO: 43 | SEQ ID NO: 118 | SEQ ID NO: 203 |
| SEQ ID NO: 43 | SEQ ID NO: 118 | SEQ ID NO: 204 |
| SEQ ID NO: 43 | SEQ ID NO: 118 | SEQ ID NO: 205 |
| SEQ ID NO: 43 | SEQ ID NO: 118 | SEQ ID NO: 206 |
| SEQ ID NO: 43 | SEQ ID NO: 118 | SEQ ID NO: 207 |
| SEQ ID NO: 43 | SEQ ID NO: 118 | SEQ ID NO: 208 |
| SEQ ID NO: 43 | SEQ ID NO: 118 | SEQ ID NO: 209 |
| SEQ ID NO: 43 | SEQ ID NO: 118 | SEQ ID NO: 210 |
| SEQ ID NO: 43 | SEQ ID NO: 118 | SEQ ID NO: 211 |
| SEQ ID NO: 43 | SEQ ID NO: 118 | SEQ ID NO: 212 |
| SEQ ID NO: 43 | SEQ ID NO: 118 | SEQ ID NO: 213 |
| SEQ ID NO: 43 | SEQ ID NO: 118 | SEQ ID NO: 214 |
| SEQ ID NO: 43 | SEQ ID NO: 118 | SEQ ID NO: 215 |
| SEQ ID NO: 43 | SEQ ID NO: 118 | SEQ ID NO: 216 |
| SEQ ID NO: 43 | SEQ ID NO: 118 | SEQ ID NO: 217 |
| SEQ ID NO: 43 | SEQ ID NO: 118 | SEQ ID NO: 218 |
| SEQ ID NO: 43 | SEQ ID NO: 118 | SEQ ID NO: 219 |
| SEQ ID NO: 43 | SEQ ID NO: 118 | SEQ ID NO: 220 |
| SEQ ID NO: 43 | SEQ ID NO: 118 | SEQ ID NO: 221 |
| SEQ ID NO: 43 | SEQ ID NO: 118 | SEQ ID NO: 329 |
| SEQ ID NO: 43 | SEQ ID NO: 118 | SEQ ID NO: 332 |
| SEQ ID NO: 43 | SEQ ID NO: 118 | SEQ ID NO: 335 |

[0208] In some embodiments, the isolated protein comprising the mutant soluble ActRIIA-ECD or ActRIIB-ECD polypeptide and other components may comprise higher level of sialylation compared to otherwise identical isolated protein in which the glycosylation site on the mutant soluble ActRIIA-ECD or ActRIIB-ECD polypeptide is more removed. In some embodiments, provided herein is a sample comprising mutant soluble ActRIIA-ECD or ActRIIB-ECD polypeptides described herein, e.g., comprising a certain percentage of sialylated glycans. For example, a sample of isolated protein may comprise at least 5%, 10%, 20%, 30%, 40%, 50%, 60%, 70%, 80%, or 90% sialylated glycans. In some embodiments, a sample of the mutant soluble ActRIIA-ECD or ActRIIB-ECD comprises at least 5%, 10%, 20%, 30%, 40%, 50%, 60%, 70%, 80%, or 90% sialylated glycans at the position corresponding to N41 of SEQ ID NO: 1. In some examples, a sample of the isolated protein may comprise at least 40% sialylated glycans. The level of sialylation may be measured by any suitable method, including those described in Gerhild Zauner et al., Electrophoresis. 2011 December; 32 (24): 3456-66. doi: 10.1002/elps.201100247, which is incorporated by reference herein in its entirety.

### Polynucleotides

[0209] In another aspect, the present disclosure provides nucleic acid molecules comprising one or more polynucleotides encoding an isolated protein or component(s) thereof. In some examples, a nucleic acid molecule may comprise a single polynucleotide encoding the full-length isolated protein. In various embodiments, the nucleic acid molecules comprise the polynucleotides described herein, and further comprise a polynucleotide encoding at least one heterologous protein described herein. In various embodiments, the nucleic acid molecules further comprise polynucleotides encoding the linkers or hinge linkers described herein. In some embodiments, the polynucleotides encodes any one of the polypeptide sequences of the fusion protein of SEQ ID NO: 222. In some embodiments, the polynucleotides encodes any one of the polypeptide sequences of a fusion protein set forth in any rows of Tables 2-7.

[0210] The subject nucleic acids may be single-stranded or double stranded. Such nucleic acids may be DNA or RNA molecules. DNA includes, for example, cDNA, genomic DNA, synthetic DNA, DNA amplified by PCR, and combinations thereof. Genomic DNA encoding isolated protein is obtained from genomic libraries which are available for a number of species. Synthetic DNA is available from chemical synthesis of overlapping oligonucleotide fragments followed by assembly of the fragments to reconstitute part or all of the coding regions and flanking sequences. RNA may be obtained from prokaryotic expression vectors which direct high-level synthesis of mRNA, such as vectors using T7 promoters and RNA polymerase. cDNA may be obtained from libraries prepared from mRNA isolated from various tissues that express the isolated protein. The DNA molecules of the disclosure include full-length genes as well as polynucleotides and fragments thereof. The full-length gene may also include sequences encoding the N-terminal signal sequence.

[0211] Such nucleic acids may be used, for example, in methods for making the isolated protein. In various embodiments, the polynucleotides encodes any one of the polypeptide sequences set forth in SEQ ID NOs: 119, 223, 120-221, 224-325, 328, 329, 331, 332, 334, 335, or 222, or fusion proteins described in Tables 2-7. In various embodiments, the polynucleotides encode a polypeptide having an amino acid sequence at least 80%, 85%, 90%, 95%, 96%, 97%, 98% or 99% identity to any one of the polypeptides sequences set forth in SEQ ID NOs: 119, 223, 120-221, 224-325, or 222, or fusion proteins described in Tables 2-7. In various embodiments, the polynucleotides encode a polypeptide having at least 90% identity to any one of the polypeptides sequences set forth in SEQ ID NOs: SEQ ID NOs: 119, 223, 120-221, 224-325, 328, 329, 331, 332, 334, 335, or 222, or fusion proteins described in Tables 2-7. In various embodiments, the polynucleotides encode a polypeptide having an amino acid sequence at least 95% identity to any one of the polypeptides sequences set forth in SEQ ID NOs: SEQ ID NOs: 119, 223, 120-221, 224-325, 328, 329, 331, 332, 334, 335, or 222, or fusion proteins described in Tables 2-7.

[0212] In various embodiments, the nucleic acid sequences of the present disclosure can be isolated, recombinant, and/or fused with a heterologous nucleotide sequence, or in a DNA library.

[0213] In various embodiments, the present disclosure provides nucleic acid molecules which hybridize under stringent or moderate conditions with the polypeptide-encoding regions of the polynucleotides described herein. One of ordinary skill in the art will understand readily that appropriate stringency conditions, which promote DNA hybridization can be varied. For example, one could perform the hybridization at 6.0 X sodium chloride/sodium citrate (SSC) at about 45° C., followed by a wash of 2.0×SSC at 50° C. For example, the salt concentration in the wash step can be selected from a low stringency of about 2.0×SSC at 50° C. to a high stringency of about 0.2×SSC at 50° C. In addition, the temperature in the wash step can be increased from low stringency conditions at room temperature, about 22° C., to high stringency conditions at about 65° C. Both temperature and salt may be varied, or temperature or salt concentration may be held constant while the other variable is changed. In one embodiment, the disclosure provides nucleic acids which hybridize under low stringency conditions of 6×SSC at room temperature followed by a wash at 2×SSC at room temperature.

[0214] In various embodiments, the recombinant nucleic acids of the present disclosure may be operably linked to one or more regulatory nucleotide sequences in an expression construct. Regulatory sequences are art-recognized and are selected to direct expression of the isolated protein. Accordingly, the term regulatory sequence includes promoters, enhancers, and other expression control elements. Exemplary regulatory sequences are described in Goeddel; Gene Expression Technology: Methods in Enzymology, Academic Press, San Diego, Calif. (1990). Typically, said one or more regulatory nucleotide sequences may include, but are not limited to, promoter sequences, leader or signal sequences, ribosomal binding sites, transcriptional start and termination sequences, translational start and termination sequences, and enhancer or activator sequences. Constitutive or inducible promoters as known in the art are contemplated by the present disclosure. The promoters may be either naturally occurring promoters, or hybrid promoters that combine elements of more than one promoter. An expression construct may be present in a cell on an episome, such as a plasmid, or the expression construct may be inserted in a chromosome. In various embodiments, the expression vector contains a selectable marker gene to allow the selection of transformed host cells. Selectable marker genes are well known in the art and will vary with the host cell used.

[0215] In another aspect, the nucleic acid molecule may be provided in an expression vector comprising a nucleotide sequence encoding the isolated protein and operably linked to at least one regulatory sequence. An “expression vector” is a type of vector that can direct the expression of a chosen polynucleotide. The term “expression vector” refers to a plasmid, phage, virus or vector for expressing a polypeptide from a polynucleotide sequence. Vectors suitable for expression in host cells are readily available and the nucleic acid molecules are inserted into the vectors using standard recombinant DNA techniques. Such vectors can include a wide variety of expression control sequences that control the expression of a DNA sequence when operatively linked to it may be used in these vectors to express DNA sequences encoding the isolated protein. Such useful expression control sequences, include, for example, the early and late promoters of SV40, tet promoter, adenovirus or cytomegalovirus immediate early promoter, RSV promoters, the lac system, the trp system, the TAC or TRC system, T7 promoter whose expression is directed by T7 RNA polymerase, the major operator and promoter regions of phage lambda, the control regions for fd coat protein, the promoter for 3-phosphoglycerate kinase or other glycolytic enzymes, the promoters of acid phosphatase, e.g., PhoS, the promoters of the yeast a-mating factors, the polyhedron promoter of the baculovirus system and other sequences known to control the expression of genes of prokaryotic or eukaryotic cells or their viruses, and various combinations thereof. It should be understood that the design of the expression vector may depend on such factors as the choice of the host cell to be transformed and/or the type of protein desired to be expressed. Moreover, the vector's copy number, the ability to control that copy number and the expression of any other protein encoded by the vector, such as antibiotic markers, should also be considered. An exemplary expression vector suitable for expression of vActRIIB is the pDSRa, (described in WO 90/14363, herein incorporated by reference) and its derivatives, containing vActRIIB polynucleotides, as well as any additional suitable vectors known in the art or described below.

[0216] A recombinant nucleic acid of the present disclosure can be produced by ligating the cloned gene, or a portion thereof, into a vector suitable for expression in either prokaryotic cells, eukaryotic cells (yeast, avian, insect or mammalian), or both. Expression vehicles for production of a recombinant isolated protein include plasmids and other vectors. For instance, suitable vectors include plasmids of the types: pBR322-derived plasmids, pEMBL-derived plasmids, pEX-derived plasmids, pBTac-derived plasmids and pUC-derived plasmids for expression in prokaryotic cells, such as E. coli.

[0217] Suitable vectors also include some mammalian expression vectors, which contain both prokaryotic sequences to facilitate the propagation of the vector in bacteria, and one or more eukaryotic transcription units that are expressed in eukaryotic cells. The pcDNAI/amp, pcDNAI/neo, pRc/CMV, pSV2gpt, pSV2neo, pSV2-dhfr, pTk2, pRSVneo, pMSG, pSVT7, pko-neo and pHyg derived vectors are examples of mammalian expression vectors suitable for transfection of eukaryotic cells. Some of these vectors are modified with sequences from bacterial plasmids, such as pBR322, to facilitate replication and drug resistance selection in both prokaryotic and eukaryotic cells. Alternatively, derivatives of viruses such as the bovine papilloma virus (BPV-1), or Epstein-Barr virus (pHEBo, pREP-derived and p205) can be used for transient expression of proteins in eukaryotic cells. Examples of other viral (including retroviral) expression systems can be found below in the description of gene therapy delivery systems. The various methods employed in the preparation of the plasmids and in transformation of host organisms are well known in the art. For other suitable expression systems for both prokaryotic and eukaryotic cells, as well as general recombinant procedures, see Molecular Cloning A Laboratory Manual, 2nd Ed., ed. by Sambrook, Fritsch and Maniatis (Cold Spring Harbor Laboratory Press, 1989) Chapters 16 and 17. In some instances, it may be desirable to express the recombinant polypeptides by the use of a baculovirus expression system. Examples of such baculovirus expression systems include pVL-derived vectors (such as pVL1392, pVL1393 and pVL941), pAcUW-derived vectors (such as pAcUW1), and pBlueBac-derived vectors (such as the B-gal containing pBlueBac III).

[0218] In various embodiments, a vector may be designed for production of the subject isolated protein in CHO cells, such as a Pcmv-Script vector (Stratagene, La Jolla, Calif.), pcDNA4 vectors (Invitrogen, Carlsbad, Calif.) and pCI-neo vectors (Promega, Madison, Wis.). As will be apparent, the subject gene constructs can be used to cause expression of the subject isolated protein in cells propagated in culture, e.g., to produce proteins, including fusion proteins or variant proteins, for purification.

[0219] This present disclosure also pertains to a host cell transfected with a recombinant gene including a nucleotide sequence coding an amino acid for one or more of the subject isolated protein. The host cell may be any prokaryotic or eukaryotic cell. For example, an isolated protein of the present disclosure may be expressed in bacterial cells such as E. coli, insect cells (e.g., using a baculovirus expression system), yeast, or mammalian cells. Other suitable host cells are known to those skilled in the art.

### Methods of Production

[0220] Accordingly, the present disclosure further pertains to methods of producing the subject isolated protein. In general, the methods may include culturing the host cell herein under conditions promoting the expression of the protein, and recovering the protein. The protein may be purified, e.g., using one or more of Protein A chromatography, size exclusion chromatography, and ion exchange chromatography.

[0221] For example, a host cell transfected with an expression vector encoding an isolated protein can be cultured under appropriate conditions to allow expression of the isolated protein to occur. The isolated protein may be secreted and isolated from a mixture of cells and medium containing the isolated protein. Alternatively, the isolated protein may be retained cytoplasmically or in a membrane fraction and the cells harvested, lysed and the protein isolated. A cell culture includes host cells, media and other byproducts. Suitable media for cell culture are well known in the art.

[0222] The polypeptides and proteins of the present disclosure can be purified according to protein purification techniques are well known to those of skill in the art. These techniques involve, at one level, the crude fractionation of the proteinaceous and non-proteinaceous fractions. Having separated the peptide polypeptides from other proteins, the peptide or polypeptide of interest can be further purified using chromatographic and electrophoretic techniques to achieve partial or complete purification (or purification to homogeneity). The purified may be a composition, isolatable from other components, wherein the protein is purified to any degree relative to its naturally-obtainable state. A purified protein may be free from the environment in which it may naturally occur. Generally, “purified” may refer to a polypeptide composition that has been subjected to fractionation to remove various other components, and which composition substantially retains its expressed biological activity.

[0223] Various techniques suitable for use in purification will be well known to those of skill in the art. These include, for example, precipitation with ammonium sulphate, PEG, antibodies (immunoprecipitation) and the like or by heat denaturation, followed by centrifugation; chromatography such as affinity chromatography (Protein-A columns), ion exchange, gel filtration, reverse phase, hydroxylapatite, hydrophobic interaction chromatography; isoelectric focusing; gel electrophoresis; and combinations of these techniques. As is generally known in the art, it is believed that the order of conducting the various purification steps may be changed, or that certain steps may be omitted, and still result in a suitable method for the preparation of a substantially purified polypeptide.

[0224] An exemplary configuration of a synthetic DNA cassette encoding an isolated protein can be generally described as comprising the following elements: 1) a signal peptide (or leader sequence) placed at the N-terminus, which can be either the native signal peptide of ActRIIB (e.g., SEQ ID NO: 49) or any surrogate signal peptide capable of mediating the processing and secretion of secreted proteins (e.g., by using the human immunoglobulin light chain leader sequence (SEQ ID NO: 50) as a surrogate signal peptide, efficient secretion of mutant soluble ActRIIB in CHO cells can be achieved); 2) a mutant soluble ActRIIB-ECD polypeptide sequence (e.g., any one of SEQ ID NOs: 119-221) fused to the signal peptide sequence; 3) a peptide linker sequence (e.g., SEQ ID NO: 44) and hinge linker sequence (SEQ ID NO: 118), and 4) an Fc domain (e.g., SEQ ID NOs: 39, 41 or 43) fused to the mutant soluble ActRIIB-ECD polypeptide sequence by the peptide/hinge linker.

### Pharmaceutical Compositions

[0225] In another aspect, the present disclosure provides a pharmaceutical composition comprising the isolated protein herein in admixture with a pharmaceutically acceptable carrier. Such pharmaceutically acceptable carriers are well known and understood by those of ordinary skill and have been extensively described (see, e.g., Remington's Pharmaceutical Sciences, 18th Edition, A. R. Gennaro, ed., Mack Publishing Company, 1990). The pharmaceutically acceptable carriers may be included for purposes of modifying, maintaining or preserving, for example, the pH, osmolarity, viscosity, clarity, color, isotonicity, odor, sterility, stability, rate of dissolution or release, adsorption or penetration of the composition. Such pharmaceutical compositions may influence the physical state, stability, rate of in vivo release, and rate of in vivo clearance of the polypeptide. Suitable pharmaceutically acceptable carriers include, but are not limited to, amino acids (such as glycine, glutamine, asparagine, arginine or lysine); antimicrobials; antioxidants (such as ascorbic acid, sodium sulfite or sodium hydrogen-sulfite); buffers (such as borate, bicarbonate, Tris-HCl, citrates, phosphates, other organic acids); bulking agents (such as mannitol or glycine), chelating agents (such as ethylenediamine tetraacetic acid (EDTA)); complexing agents (such as caffeine, polyvinylpyrrolidone, beta-cyclodextrin or hydroxypropyl-beta-cyclodextrin); fillers; monosaccharides; disaccharides and other carbohydrates (such as glucose, mannose, or dextrins); proteins (such as serum albumin, gelatin or immunoglobulins); coloring; flavoring and diluting agents; emulsifying agents; hydrophilic polymers (such polyvinylpyrrolidone); low molecular weight polypeptides; salt-forming counter ions (such as sodium); preservatives (such as benzalkonium chloride, benzoic acid, salicylic acid, thimerosal, phenethyl alcohol, methylparaben, propylparaben, chlorhexidine, sorbic acid or hydrogen peroxide); solvents (such as glycerin, propylene glycol or polyethylene glycol); sugar alcohols (such as mannitol or sorbitol); suspending agents; surfactants or wetting agents (such as pluronics, PEG, sorbitan esters, polysorbates such as polysorbate 20, polysorbate 80, triton, tromethamine, lecithin, cholesterol, tyloxapal); stability enhancing agents (sucrose or sorbitol); tonicity enhancing agents (such as alkali metal halides (preferably sodium or potassium chloride, mannitol sorbitol); delivery vehicles; diluents; excipients and/or pharmaceutical adjuvants.

[0226] The primary vehicle or carrier in a pharmaceutical composition may be either aqueous or non-aqueous in nature. For example, a suitable vehicle or carrier may be water for injection, physiological saline solution or artificial cerebrospinal fluid, possibly supplemented with other materials common in compositions for parenteral administration. Neutral buffered saline or saline mixed with serum albumin are further exemplary vehicles. Other exemplary pharmaceutical compositions comprise Tris buffer of about pH 7.0-8.5, or acetate buffer of about pH 4.0-5.5, which may further include sorbitol or a suitable substitute thereof. In one embodiment of the present disclosure, compositions may be prepared for storage by mixing the selected composition having the desired degree of purity with optional formulation agents (Remington's Pharmaceutical Sciences, supra) in the form of a lyophilized cake or an aqueous solution. Further, the therapeutic composition may be formulated as a lyophilizate using appropriate excipients such as sucrose. The optimal pharmaceutical composition will be determined by one of ordinary skill in the art depending upon, for example, the intended route of administration, delivery format, and desired dosage.

[0227] When parenteral administration is contemplated, the therapeutic pharmaceutical compositions may be in the form of a pyrogen-free, parenterally acceptable aqueous solution comprising the desired isolated protein in a pharmaceutically acceptable vehicle. A particularly suitable vehicle for parenteral injection is sterile distilled water in which a polypeptide is formulated as a sterile, isotonic solution, properly preserved. In various embodiments, pharmaceutical formulations suitable for injectable administration may be formulated in aqueous solutions, preferably in physiologically compatible buffers such as Hanks' solution, Ringer's solution, or physiologically buffered saline. Aqueous injection suspensions may contain substances that increase the viscosity of the suspension, such as sodium carboxymethyl cellulose, sorbitol, or dextran. Additionally, suspensions of the active compounds may be prepared as appropriate oily injection suspensions. Optionally, the suspension may also contain suitable stabilizers or agents to increase the solubility of the compounds and allow for the preparation of highly concentrated solutions.

[0228] In various embodiments, the therapeutic pharmaceutical compositions may be formulated for targeted delivery using a colloidal dispersion system. Colloidal dispersion systems include macromolecule complexes, nanocapsules, microspheres, beads, and lipid-based systems including oil-in-water emulsions, micelles, mixed micelles, and liposomes. Examples of lipids useful in liposome production include phosphatidyl compounds, such as phosphatidylglycerol, phosphatidylcholine, phosphatidylserine, phosphatidylethanolamine, sphingolipids, cerebrosides, and gangliosides. Illustrative phospholipids include egg phosphatidylcholine, dipalmitoylphosphatidylcholine, and distearoylphosphatidylcholine. The targeting of liposomes is also possible based on, for example, organ-specificity, cell-specificity, and organelle-specificity and is known in the art.

[0229] In various embodiments, oral administration of the pharmaceutical compositions is contemplated. Pharmaceutical compositions that are administered in this fashion can be formulated with or without those carriers customarily used in the compounding of solid dosage forms such as tablets and capsules. In solid dosage forms for oral administration (capsules, tablets, pills, dragees, powders, granules, and the like), one or more therapeutic compounds of the present disclosure may be mixed with one or more pharmaceutically acceptable carriers, such as sodium citrate or dicalcium phosphate, and/or any of the following: (1) fillers or extenders, such as starches, lactose, sucrose, glucose, mannitol, and/or silicic acid; (2) binders, such as, for example, carboxymethylcellulose, alginates, gelatin, polyvinyl pyrrolidone, sucrose, and/or acacia; (3) humectants, such as glycerol; (4) disintegrating agents, such as agar-agar, calcium carbonate, potato or tapioca starch, alginic acid, certain silicates, and sodium carbonate; (5) solution retarding agents, such as paraffin; (6) absorption accelerators, such as quaternary ammonium compounds; (7) wetting agents, such as, for example, cetyl alcohol and glycerol monostearate; (8) absorbents, such as kaolin and bentonite clay; (9) lubricants, such a talc, calcium stearate, magnesium stearate, solid polyethylene glycols, sodium lauryl sulfate, and mixtures thereof; and (10) coloring agents. In the case of capsules, tablets and pills, the pharmaceutical compositions may also comprise buffering agents. Solid compositions of a similar type may also be employed as fillers in soft and hard-filled gelatin capsules using such excipients as lactose or milk sugars, as well as high molecular weight polyethylene glycols and the like. Liquid dosage forms for oral administration include pharmaceutically acceptable emulsions, microemulsions, solutions, suspensions, syrups, and elixirs. In addition to the active ingredient, the liquid dosage forms may contain inert diluents commonly used in the art, such as water or other solvents, solubilizing agents and emulsifiers, such as ethyl alcohol, isopropyl alcohol, ethyl carbonate, ethyl acetate, benzyl alcohol, benzyl benzoate, propylene glycol, 1,3-butylene glycol, oils (in particular, cottonseed, groundnut, corn, germ, olive, castor, and sesame oils), glycerol, tetrahydrofuryl alcohol, polyethylene glycols and fatty acid esters of sorbitan, and mixtures thereof Besides inert diluents, the oral compositions can also include adjuvants such as wetting agents, emulsifying and suspending agents, sweetening, flavoring, coloring, perfuming, and preservative agents.

[0230] In various embodiments, topical administration of the pharmaceutical compositions, either to skin or to mucosal membranes, is contemplated. The topical formulations may further include one or more of the wide variety of agents known to be effective as skin or stratum corneum penetration enhancers. Examples of these are 2-pyrrolidone, N-methyl-2-pyrrolidone, dimethylacetamide, dimethylformamide, propylene glycol, methyl or isopropyl alcohol, dimethyl sulfoxide, and azone. Additional agents may further be included to make the formulation cosmetically acceptable. Examples of these are fats, waxes, oils, dyes, fragrances, preservatives, stabilizers, and surface active agents. Keratolytic agents such as those known in the art may also be included. Examples are salicylic acid and sulfur. Dosage forms for the topical or transdermal administration include powders, sprays, ointments, pastes, creams, lotions, gels, solutions, patches, and inhalants. The active compound may be mixed under sterile conditions with a pharmaceutically acceptable carrier, and with any preservatives, buffers, or propellants which may be required. The ointments, pastes, creams and gels may contain, in addition to a subject composition of the disclosure, excipients, such as animal and vegetable fats, oils, waxes, paraffins, starch, tragacanth, cellulose derivatives, polyethylene glycols, silicones, bentonites, silicic acid, talc and zinc oxide, or mixtures thereof.

[0231] Additional pharmaceutical compositions contemplated for use herein include formulations involving polypeptides in sustained- or controlled-delivery formulations. Techniques for formulating a variety of other sustained- or controlled-delivery means, such as liposome carriers, bio-erodible microparticles or porous beads and depot injections, are also known to those skilled in the art.

[0232] An effective amount of a pharmaceutical composition to be employed therapeutically will depend, for example, upon the therapeutic context and objectives. One skilled in the art will appreciate that the appropriate dosage levels for treatment will thus vary depending, in part, upon the molecule delivered, the indication for which the polypeptide is being used, the route of administration, and the size (body weight, body surface or organ size) and condition (the age and general health) of the patient. Accordingly, the clinician may titer the dosage and modify the route of administration to obtain the optimal therapeutic effect. A typical dosage may range from about 0.1 mg/kg to up to about 100 mg/kg or more, depending on the factors mentioned above. Polypeptide compositions may be preferably injected or administered intravenously. Long-acting pharmaceutical compositions may be administered every three to four days, every week, or biweekly depending on the half-life and clearance rate of the particular formulation. The frequency of dosing will depend upon the pharmacokinetic parameters of the polypeptide in the formulation used. Typically, a composition is administered until a dosage is reached that achieves the desired effect. The composition may therefore be administered as a single dose, or as multiple doses (at the same or different concentrations/dosages) over time, or as a continuous infusion. Further refinement of the appropriate dosage is routinely made. Appropriate dosages may be ascertained through use of appropriate dose-response data.

[0233] The route of administration of the pharmaceutical composition is in accord with known methods, e.g. orally, through injection by intravenous, intraperitoneal, intracerebral (intra-parenchymal), intracerebroventricular, intramuscular, intra-ocular, intraarterial, intraportal, intralesional routes, intramedullary, intrathecal, intraventricular, transdermal, subcutaneous, or intraperitoneal; as well as intranasal, enteral, topical, sublingual, urethral, vaginal, or rectal means, by sustained release systems or by implantation devices. In some examples, the pharmaceutical composition is formulated for administration by a route selected from the group consisting of: subcutaneous, intramuscular, intravenous, and intrathecal administration.

[0234] Where desired, the compositions may be administered by bolus injection or continuously by infusion, or by implantation device. Alternatively or additionally, the composition may be administered locally via implantation of a membrane, sponge, or another appropriate material on to which the desired molecule has been absorbed or encapsulated. Where an implantation device is used, the device may be implanted into any suitable tissue or organ, and delivery of the desired molecule may be via diffusion, timed-release bolus, or continuous administration.

[0235] In various embodiments, the present disclosure provides a method for treating muscle wasting in a subject, comprising administering to the subject a therapeutically amount of the isolated protein in admixture with a pharmaceutically acceptable carrier. For example, the isolated protein may comprise an amino acid sequence selected from the group consisting of SEQ ID NOs: 119-221, 329, 332, and 335. In various embodiments, the isolated protein further comprise a linker having the amino acid sequence set forth in SEQ ID NO: 44, a hinge linker having the amino acid sequence set forth in SEQ ID NO: 118, and a human IgG4 Fc (SEQ ID NO: 43). In some examples, the isolated protein is a fusion protein comprising a sequence of SEQ ID NO: 222.

[0236] In various embodiments, the present disclosure provides a method for treating bone disorders in a subject, comprising administering to the subject a therapeutically amount of the isolated protein in admixture with a pharmaceutically acceptable carrier. For example, the isolated protein may comprise an amino acid sequence selected from the group consisting of SEQ ID NO: 119-221, 329, 332, and 335. In various embodiments, the isolated protein further comprise a linker having the amino acid sequence set forth in SEQ ID NO: 44, a hinge linker having the amino acid sequence set forth in SEQ ID NO: 118, and a human IgG4 Fc (SEQ ID NO: 43). In some examples, the isolated protein is a fusion protein comprising a sequence of SEQ ID NO: 222.

[0237] In various embodiments, the present disclosure provides a method for treating metabolic disorders in a subject, comprising administering to the subject a therapeutically amount of the isolated protein in admixture with a pharmaceutically acceptable carrier. For example, the isolated protein may comprise an amino acid sequence selected from the group consisting of SEQ ID NO: 119-221, 329, 332, and 335. In various embodiments, the isolated protein further comprise a linker having the amino acid sequence set forth in SEQ ID NO: 44, a hinge linker having the amino acid sequence set forth in SEQ ID NO: 118, and a human IgG4 Fc (SEQ ID NO: 43). In some examples, the isolated protein is a fusion protein comprising a sequence of SEQ ID NO: 222.

[0238] In various embodiments, the present disclosure provides a method for treating fibrosis in a subject, comprising administering to the subject a therapeutically amount of the isolated protein in admixture with a pharmaceutically acceptable carrier. For example, the isolated protein may comprise an amino acid sequence selected from the group consisting of SEQ ID NO: 119-221, 329, 332, and 335. In various embodiments, the isolated protein further comprise a linker having the amino acid sequence set forth in SEQ ID NO: 44, a hinge linker having the amino acid sequence set forth in SEQ ID NO: 118, and a human IgG4 Fc (SEQ ID NO: 43). In some examples, the isolated protein is a fusion protein comprising a sequence of SEQ ID NO: 222.

[0239] In various embodiments, the present disclosure provides a method for treating autoimmune/inflammatory disease in a subject, comprising administering to the subject a therapeutically amount of the isolated protein in admixture with a pharmaceutically acceptable carrier. For example, the isolated protein may comprise an amino acid sequence selected from the group consisting of SEQ ID NO: 119-221, 329, 332, and 335. In various embodiments, the isolated protein further comprise a linker having the amino acid sequence set forth in SEQ ID NO: 44, a hinge linker having the amino acid sequence set forth in SEQ ID NO: 118, and a human IgG4 Fc (SEQ ID NO: 43). In some examples, the isolated protein is a fusion protein comprising a sequence of SEQ ID NO: 222.

[0240] In various embodiments, the present disclosure provides a method for treating cardiovascular disease in a subject, comprising administering to the subject a therapeutically amount of the isolated protein in admixture with a pharmaceutically acceptable carrier. For example, the isolated protein may comprise an amino acid sequence selected from the group consisting of SEQ ID NO: 119-221, 329, 332, and 335. In various embodiments, the isolated protein further comprise a linker having the amino acid sequence set forth in SEQ ID NO: 44, a hinge linker having the amino acid sequence set forth in SEQ ID NO: 118, and a human IgG4 Fc (SEQ ID NO: 43). In some examples, the isolated protein is a fusion protein comprising a sequence of SEQ ID NO: 222.

[0241] In various embodiments, the present disclosure provides a method for treating cancer in a subject, comprising administering to the subject a therapeutically amount of the isolated protein in admixture with a pharmaceutically acceptable carrier. For example, the isolated protein may comprise an amino acid sequence selected from the group consisting of SEQ ID NO: 119-221, 329, 332, and 335. In various embodiments, the isolated protein further comprise a linker having the amino acid sequence set forth in SEQ ID NO: 44, a hinge linker having the amino acid sequence set forth in SEQ ID NO: 118, and a human IgG4 Fc (SEQ ID NO: 43). In some examples, the isolated protein is a fusion protein comprising a sequence of SEQ ID NO: 222.

[0242] In various embodiments, the present disclosure provides a method for treating renal disease in a subject, comprising administering to the subject a therapeutically amount of the isolated protein in admixture with a pharmaceutically acceptable carrier. For example, the isolated protein may comprise an amino acid sequence selected from the group consisting of SEQ ID NO: 119-221, 329, 332, and 335. In various embodiments, the isolated protein further comprise a linker having the amino acid sequence set forth in SEQ ID NO: 44, a hinge linker having the amino acid sequence set forth in SEQ ID NO: 118, and a human IgG4 Fc (SEQ ID NO: 43). In some examples, the isolated protein is a fusion protein comprising a sequence of SEQ ID NO: 222.

[0243] In various embodiments, the present disclosure provides a method for treating arthritis in a subject, comprising administering to the subject a therapeutically amount of the isolated protein in admixture with a pharmaceutically acceptable carrier. For example, the isolated protein may comprise an amino acid sequence selected from the group consisting of SEQ ID NO: 119-221, 329, 332, and 335. In various embodiments, the isolated protein further comprise a linker having the amino acid sequence set forth in SEQ ID NO: 44, a hinge linker having the amino acid sequence set forth in SEQ ID NO: 118, and a human IgG4 Fc (SEQ ID NO: 43). In some examples, the isolated protein is a fusion protein comprising a sequence of SEQ ID NO: 222.

[0244] In various embodiments, the present disclosure provides a method for treating anorexia in a subject, comprising administering to the subject a therapeutically amount of the isolated protein in admixture with a pharmaceutically acceptable carrier. For example, the isolated protein may comprise an amino acid sequence selected from the group consisting of SEQ ID NO: 119-221, 329, 332, and 335. In various embodiments, the isolated protein further comprise a linker having the amino acid sequence set forth in SEQ ID NO: 44, a hinge linker having the amino acid sequence set forth in SEQ ID NO: 118, and a human IgG4 Fc (SEQ ID NO: 43). In some examples, the isolated protein is a fusion protein comprising a sequence of SEQ ID NO: 222.

[0245] In various embodiments, the present disclosure provides a method for treating liver disease in a subject, comprising administering to the subject a therapeutically amount of the isolated protein in admixture with a pharmaceutically acceptable carrier. For example, the isolated protein may comprise an amino acid sequence selected from the group consisting of SEQ ID NO: 119-221, 329, 332, and 335. In various embodiments, the isolated protein further comprise a linker having the amino acid sequence set forth in SEQ ID NO: 44, a hinge linker having the amino acid sequence set forth in SEQ ID NO: 118, and a human IgG4 Fc (SEQ ID NO: 43). In some examples, the isolated protein is a fusion protein comprising a sequence of SEQ ID NO: 222.

[0246] In various embodiments, the present disclosure provides a method of inducing stem cell growth for tissue repair or organ regeneration in a subject, comprising administering to the subject a therapeutically amount of the isolated protein in admixture with a pharmaceutically acceptable carrier. For example, the isolated protein may comprise an amino acid sequence selected from the group consisting of SEQ ID NO: 119-221, 329, 332, and 335. In various embodiments, the isolated protein further comprise a linker having the amino acid sequence set forth in SEQ ID NO: 44, a hinge linker having the amino acid sequence set forth in SEQ ID NO: 118, and a human IgG4 Fc (SEQ ID NO: 43). In some examples, the isolated protein is a fusion protein comprising a sequence of SEQ ID NO: 222.

[0247] In various embodiments, the present disclosure provides a method for treating anemia in a subject, comprising administering to the subject a therapeutically amount of the isolated protein in admixture with a pharmaceutically acceptable carrier. For example, the isolated protein may comprise an amino acid sequence selected from the group consisting of SEQ ID NO: 119-221, 329, 332, and 335. In various embodiments, the isolated protein further comprise a linker having the amino acid sequence set forth in SEQ ID NO: 44, a hinge linker having the amino acid sequence set forth in SEQ ID NO: 118, and a human IgG4 Fc (SEQ ID NO: 43). In some examples, the isolated protein is a fusion protein comprising a sequence of SEQ ID NO: 222.

[0248] In various embodiments, the present disclosure provides a method for treating pain in a subject, comprising administering to the subject a therapeutically amount of the isolated protein in admixture with a pharmaceutically acceptable carrier. For example, the isolated protein may comprise an amino acid sequence selected from the group consisting of SEQ ID NO: 119-221, 329, 332, and 335. In various embodiments, the isolated protein further comprise a linker having the amino acid sequence set forth in SEQ ID NO: 44, a hinge linker having the amino acid sequence set forth in SEQ ID NO: 118, and a human IgG4 Fc (SEQ ID NO: 43). In some examples, the isolated protein is a fusion protein comprising a sequence of SEQ ID NO: 222.

[0249] In various embodiments, the present disclosure provides a method for treating aging in a subject, comprising administering to the subject a therapeutically amount of the isolated protein in admixture with a pharmaceutically acceptable carrier. For example, the isolated protein may comprise an amino acid sequence selected from the group consisting of SEQ ID NO: 119-221, 329, 332, and 335. In various embodiments, the isolated protein further comprise a linker having the amino acid sequence set forth in SEQ ID NO: 44, a hinge linker having the amino acid sequence set forth in SEQ ID NO: 118, and a human IgG4 Fc (SEQ ID NO: 43). In some examples, the isolated protein is a fusion protein comprising a sequence of SEQ ID NO: 222.

[0250] In some embodiments, the pharmaceutical composition may comprise a plurality of the isolated proteins and at least 5%, 10%, 20%, 30%, 40%, 50%, 60%, 70%, 80%, or 90% of the isolated proteins are sialylated. For example, the pharmaceutical composition may comprise a plurality of the isolated proteins and at least 40% of the isolated proteins are sialylated. In some embodiments, the pharmaceutical composition may comprise a plurality of mutant soluble ActRIIA-ECD or ActRIIB-ECD proteins and at least 5%, 10%, 20%, 30%, 40%, 50%, 60%, 70%, 80%, or 90% of the mutant soluble ActRIIA-ECD or ActRIIB-ECD are sialylated at the position corresponding to N41 of SEQ ID NO: 1. Preferably, at least 40%, 50%, 60%, 70%, 80%, or 90% of the mutant soluble ActRIIA-ECD or ActRIIB-ECD in the pharmaceutical composition are sialylated at the position corresponding to N41 of SEQ ID NO: 1.

[0251] In some aspects, provided herein include a sample comprising a plurality of the isolated proteins and at least 5%, 10%, 20%, 30%, 40%, 50%, 60%, 70%, 80%, or 90% of the isolated proteins are sialylated. For example, the sample may comprise a plurality of the isolated proteins and at least 40% of the isolated proteins are sialylated. In some embodiments, the sample may comprise a plurality of mutant soluble ActRIIA-ECD or ActRIIB-ECD proteins and at least 5%, 10%, 20%, 30%, 40%, 50%, 60%, 70%, 80%, or 90% of the mutant soluble ActRIIA-ECD or ActRIIB-ECD are sialylated at the position corresponding to N41 of SEQ ID NO: 1. Preferably, at least 40%, 50%, 60%, 70%, 80%, or 90% of the mutant soluble ActRIIA-ECD or ActRIIB-ECD in the sample are sialylated at the position corresponding to N41 of SEQ ID NO: 1.

### Methods of Treatment and Therapeutic Uses

[0252] In one aspect, the present disclosure provides a method for treating myostatin-related or activin A-related disorders in a subject, comprising administering to the subject a therapeutically effective amount (either as monotherapy or in a combination therapy regimen) of the isolated protein of the present disclosure in pharmaceutically acceptable carrier. Importantly, the pharmaceutical compositions of the present disclosure can be used to increase lean muscle mass as a percentage of body weight and decrease fat mass as percentage of body weight, while avoiding safety concerns reported for existing ActRIIB-Fc fusion protein-based therapeutics.

[0253] In one aspect, the present disclosure provides a method of treating or preventing a muscle wasting in a subject, comprising administering to the subject a therapeutically effective amount (either as monotherapy or in a combination therapy regimen) of the isolated protein of the present disclosure in admixture with a pharmaceutically acceptable carrier, wherein such administration attenuates the loss of muscle mass and/or loss of muscle function. In various embodiments, the muscle wasting is associated with a disease selected from the group consisting of: muscular dystrophies (such as Duchenne muscular dystrophy (DMD), Becker MD, Limb-Girdle MD, Myotonic MD and Facioscapulohumeral muscular dystrophy (FSHD)), myositis (such as Dermatomyositis, Polymyositis and Inclusion body myositis), myopathy (including inherited myopathy as well as acquired myopathy such as myopathy induced by androgen-deprivation therapy, corticosteroids or statins), motoneuron disease (such as Lou Gehrig's Disease or ALS), spinal muscular atrophy (including Infantile progressive spinal muscular atrophy, Intermediate spinal muscular atrophy, Juvenile spinal muscular atrophy and Adult spinal muscular atrophy), neuromuscular junction disease (such as Myasthenia gravis, Lambert-Eaton syndrome and Botulism), peripheral nerve disease (such as Charcot-Marie tooth disease, Dejerine-Sottas disease and Friedreich's ataxia), spinal cord injury, stroke, neurodegenerative disease (including Parkinson's disease, Huntington's disease, Alzheimer's disease and Creutzfeldt-Jakob disease), cancer (such as lung cancer, pancreatic cancer, gastric cancer, colon cancer, prostate cancer, breast cancer, esophageal cancer, head and neck cancer, ovarian cancer, rhabdomyosarcoma, glioma, neuroblastoma, lymphoma, and multiple myeloma, skin cancer, and blood cancer), organ failure (such as heart failure, renal failure and liver failure, trauma (such as burns or motorcycle accident), disuse (such as long-term bed-rest, hospitalization, and spaceflight), infection (such as HIV, Polio and Sepsis), chronic obstructive pulmonary disease (COPD), and aging (such as sarcopenia, sarcopenic obesity and osteroarthritis).

[0254] In some examples, the myostatin-related or activin A-related disorder is selected from the group consisting of muscle wasting, a bone disorder, a metabolic disorder, and anemia. In some examples, the muscle wasting is associate with a condition selected from the group consisting of: muscular dystrophy, myositis, myopathy (e.g., critical illness myopathy, e.g., ICU myopathy), motorneuron disease, muscle atrophy, amyotrophic lateral sclerosis, spinal muscular atrophy, neuromuscular junction disease, peripheral nerve disease, spinal cord injury, stroke, neurodegenerative disease, anorexia, cancer, organ failure, trauma, disuse, infection, chronic obstructive pulmonary disease (COPD), sarcopenia, sarcopenic obesity, osteroarthritis, androgen deprivation, emphysema, cystic fibrosis, chronic heart failure, cardiac atrophy, cancer cachexia, renal failure, uremia, protein energy wasting, anorexia, malnutrition, sarcopenia, Acquired Immunodeficiency Syndrome (AIDS), sepsis, burn injury, diabetes, carpal tunnel syndrome, prolonged bed rest, bone fracture, aging, and exposure to microgravity. In some examples, the spinal muscular atrophy is selected from the group consisting of infantile progressive spinal muscular atrophy, intermediate spinal muscular atrophy, juvenile spinal muscular atrophy and adult spinal muscular atrophy. In some examples, the muscular dystrophy may be myotonic dystrophy. In one example, the myotonic dystrophy may be myotonic dystrophy type 1 (DM1). In another example, the myotonic dystrophy may be myotonic dystrophy type 2 (DM2). In some examples, the peripheral nerve disease is selected from the group consisting of Charcot-Marie Tooth disease, Dejerine-Sottas disease and Friedreich's ataxia. In some examples, the neurodegenerative disease is selected from the group consisting of Parkinson's disease, Huntington's disease, Alzheimer's disease and Creutzfeldt-Jakob disease. In some examples, the aging condition is selected from the group consisting of: frailty of the elderly, age-related sarcopenia, and osteoarthritis. In some examples, the motorneuron disease is amyotrophic lateral sclerosis (ALS or Lou Gehrig's Disease). In some examples, the bone disease is selected from the group consisting of: osteoporosis, renal osteodystrophy, osteomalacia, osteogenesis imperfecta, fibrodysplasia ossificans progressiva, corticosteroid-induced bone loss, androgen-deprivation therapy-induced bone loss, bone fracture, cancer-induced bone loss, bone metastasis, Paget's disease of the bone, Rickets, Perthes' disease and fibrous dysplasia.

[0255] In another aspect, the present disclosure provides a method of treating or preventing bone disease in a subject, comprising administering to the subject a therapeutically effective amount (either as monotherapy or in a combination therapy regimen) of an isolated protein of the present disclosure in admixture with a pharmaceutically acceptable carrier. In various embodiments, the bone disease is selected from the group consisting of: osteoporosis, renal osteodystrophy, osteogenesis imperfecta, fibrodysplasia ossificans progressiva, corticosteroid-induced bone loss, androgen-depriviation therapy-induced bone loss, hip fracture, cancer-induced bone loss, bone metastasis, Paget's disease, Rickets, osteomalacia, Perthes' disease and fibrous dysplasia.

[0256] In another aspect, the present disclosure provides a method of treating or preventing a metabolic disorder in a subject, comprising administering to the subject a therapeutically effective amount (either as monotherapy or in a combination therapy regimen) of an isolated protein of the present disclosure in admixture with a pharmaceutically acceptable carrier. In various embodiments, the metabolic disorder is selected from the group consisting of: metabolic syndrome, obesity, dyslipidemia, sarcopenic obesity, non-alcoholic fatty liver disease such as non-alcoholic steatohepatitis (NASH), alcoholic fatty liver disease, insulin resistance, diabetes as well as diabetic myopathy, diabetic nephropathy, diabetic neuropathy, diabetic retinopathy, and hemochromatosis.

[0257] In another aspect, the present disclosure provides a method of treating or preventing fibrosis in a subject, comprising administering to the subject a therapeutically effective amount (either as monotherapy or in a combination therapy regimen) of an isolated protein of the present disclosure in admixture with a pharmaceutically acceptable carrier. In various embodiments, the fibrosis is selected from the group consisting of: interstitial lung disease, idiotypic pulmonary fibrosis, cystic fibrosis, liver fibrosis, cirrhosis, biliary atresia, myocardial infarction, cardiac fibrosis, renal fibrosis, myelofibrosis, idiopathic retroperitoneal fibrosis, nephrogenic fibrosing dermopathy, inflammatory bowel disease or Crohn's disease, keloid, scleroderma, retroperitoneal fibrosis, and arthrofibrosis.

[0258] In another aspect, the present disclosure provides a method of treating or preventing an autoimmune/inflammatory disease in a subject, comprising administering to the subject a therapeutically effective amount (either as monotherapy or in a combination therapy regimen) of an isolated protein of the present disclosure in admixture with a pharmaceutically acceptable carrier. In various embodiments, the disease is selected from the group consisting of: autoimmune/inflammatory disorders including multiple sclerosis (MS), systemic sclerosis, diabetes (type-1), glomerulonephritis, myasthenia gravis, psoriasis, systemic lupus erythematosus, polymyositis, Crohn's disease, ulcerative colitis, and primary biliary cirrhosis, arthritis, asthma, and sepsis.

[0259] In another aspect, the present disclosure provides a method of treating cardiovascular disease in a subject, comprising administering to the subject a therapeutically effective amount (either as monotherapy or in a combination therapy regimen) of an isolated protein of the present disclosure in admixture with a pharmaceutically acceptable carrier. In various embodiments, the cardiovascular disease is selected from the group consisting of: heart failure, cardiac atrophy, pulmonary arterial hypertension (PAH), myocarditis, coronary artery disease, myocardial infarction, cardiac arrhythmias, heart valve disease, cardiomyopathy, pericardial disease, aorta disease, Marfan syndrome and cardiac transplant.

[0260] In another aspect, the present disclosure provides for a method of treating cardiac dysfunction or heart failure in a subject comprising administering an effective amount of an isolated protein into the subject. The modulation may improve cardiac function of the subject by at least 5%, at least 10%, at least 15%, at least 20%, at least 25%, at least 30%, at least 35%, at least 40%, at least 45%, at least 50%, at least 55%, at least 60%, at least 65%, at least 70%, at least 75%, at least 80%, at least 85%, at least 90%, or at least 95%. The improvement of cardiac function can be evaluated by echocardiography to measure 1) cardiac pump functions focusing on the ejected blood volume and the efficiency of ejection and 2) myocardial functions focusing on the strength of myocardial contraction.

[0261] In another aspect, the present disclosure provides for a method of treating cancer cells in a subject, comprising administering to the subject a therapeutically effective amount (either as monotherapy or in a combination therapy regimen) of an isolated protein of the present disclosure in pharmaceutically acceptable carrier, wherein such administration inhibits the growth and/or proliferation of a cancer cell. Specifically, an isolated protein of the present disclosure is useful in treating disorders characterized as cancer. Such disorders include, but are not limited to solid tumors, such as cancers of the breast, respiratory tract, brain, reproductive organs, digestive tract, urinary tract, eye, liver, skin, head and neck, thyroid, parathyroid and their distant metastases, lymphomas, sarcomas, multiple myeloma and leukemia. Examples of breast cancer include, but are not limited to invasive ductal carcinoma, invasive lobular carcinoma, ductal carcinoma in situ, and lobular carcinoma in situ. Examples of cancers of the respiratory tract include, but are not limited to small-cell and non-small-cell lung carcinoma, as well as bronchial adenoma and pleuropulmonary blastoma. Examples of brain cancers include, but are not limited to brain stem and hypophthalmic glioma, cerebellar and cerebral astrocytoma, medulloblastoma, ependymoma, as well as neuroectodermal and pineal tumor. Tumors of the male reproductive organs include, but are not limited to prostate and testicular cancer. Tumors of the female reproductive organs include, but are not limited to endometrial, cervical, ovarian, vaginal, and vulvar cancer, as well as sarcoma of the uterus. Tumors of the digestive tract include, but are not limited to anal, colon, colorectal, esophageal, gallbladder, gastric, pancreatic, rectal, small-intestine, and salivary gland cancers. Tumors of the urinary tract include, but are not limited to bladder, penile, kidney, renal pelvis, ureter, and urethral cancers. Eye cancers include, but are not limited to intraocular melanoma and retinoblastoma. Examples of liver cancers include, but are not limited to hepatocellular carcinoma (liver cell carcinomas with or without fibrolamellar variant), cholangiocarcinoma (intrahepatic bile duct carcinoma), and mixed hepatocellular cholangiocarcinoma. Skin cancers include, but are not limited to squamous cell carcinoma, Kaposi's sarcoma, malignant melanoma, Merkel cell skin cancer, and non-melanoma skin cancer. Head-and-neck cancers include, but are not limited to nasopharyngeal cancer, and lip and oral cavity cancer. Lymphomas include, but are not limited to AIDS-related lymphoma, non-Hodgkin's lymphoma, cutaneous T-cell lymphoma, Hodgkin's disease, and lymphoma of the central nervous system. Sarcomas include, but are not limited to sarcoma of the soft tissue, osteosarcoma, malignant fibrous histiocytoma, lymphosarcoma, and rhabdomyosarcoma. Leukemias include, but are not limited to acute myeloid leukemia, acute lymphoblastic leukemia, chronic lymphocytic leukemia, chronic myelogenous leukemia, and hairy cell leukemia. In certain embodiments, the cancer will be a cancer with high expression of TGF-B family member, such as activin A, myostatin, TGF-β and GDF15, e.g., pancreatic cancer, gastric cancer, ovarian cancer, colorectal cancer, melanoma leukemia, lung cancer, prostate cancer, brain cancer, bladder cancer, and head-neck cancer.

[0262] In another aspect, the present disclosure provides for a method of treating chronic kidney disease (CKD) in a subject, comprising administering to the subject a therapeutically effective amount (either as monotherapy or in a combination therapy regimen) of an isolated protein of the present disclosure in pharmaceutically acceptable carrier, wherein such administration attenuates the loss of muscle mass and/or loss of muscle function or inhibits kidney fibrosis. Specifically, an isolated protein of the present disclosure is useful in treating CKD including renal failure, interstitial fibrosis, and kidney dialysis as well as protein energy wasting (PEW) associated with CKD. The modulation may improve CKD or PEW of the subject by at least 5%, at least 10%, at least 15%, at least 20%, at least 25%, at least 30%, at least 35%, at least 40%, at least 45%, at least 50%, at least 55%, at least 60%, at least 65%, at least 70%, at least 75%, at least 80%, at least 85%, at least 90%, or at least 95%. The improvement of renal function can be evaluated by measuring protein/creatinine ratio (PCR) in the urine and glomerular filtration rate (GFR). Improvement of PEW can be evaluated by measuring serum levels of albumin and inflammatory cytokines, rate of protein synthesis and degradation, body mass, muscle mass, physical activity and nutritional outcomes.

[0263] In another aspect, the present disclosure provides for methods for treating arthritis in a subject, comprising administering to the subject a therapeutically effective amount (either as monotherapy or in a combination therapy regimen) of an isolated protein of the present disclosure in pharmaceutically acceptable carrier. Specifically, an isolated protein of the present disclosure is useful in treating an arthritis selected from rheumatoid arthritis and osteoarthritis.

[0264] In another aspect, the present disclosure provides for methods for treating anorexia in a subject, comprising administering to the subject a therapeutically effective amount (either as monotherapy or in a combination therapy regimen) of an isolated protein of the present disclosure in pharmaceutically acceptable carrier. Specifically, an isolated protein of the present disclosure is useful in treating an anorexia selected from anorexia nervosa and anorexia-cachexia syndrome.

[0265] In another aspect, the present disclosure provides for methods for treating liver disease in a subject, comprising administering to the subject a therapeutically effective amount (either as monotherapy or in a combination therapy regimen) of an isolated protein of the present disclosure in pharmaceutically acceptable carrier. Specifically, an isolated protein of the present disclosure is useful in treating a liver disease selected from non-alcoholic fatty liver disease, non-alcoholic steatohepatitis, alcoholic fatty liver disease, liver cirrhosis, liver failure, autoimmune hepatitis and hepatocellular carcinoma.

[0266] In another aspect, the present disclosure provides for methods for organ or tissue transplantation in a subject, comprising administering to the subject a therapeutically effective amount (either as monotherapy or in a combination therapy regimen) of an isolated protein of the present disclosure in pharmaceutically acceptable carrier. Specifically, an isolated protein of the present disclosure is useful in treating a transplantation selected from organ transplantations of the heart, kidneys, liver, lungs, pancreas, intestine and thymus or from tissues transplantations of the bones, tendons, cornea, skin, heart valves, nerves and veins.

[0267] In another aspect, the present disclosure provides for methods for treating anemia in a subject, comprising administering to the subject a therapeutically effective amount (either as monotherapy or in a combination therapy regimen) of an isolated protein of the present disclosure in pharmaceutically acceptable carrier. In various embodiments, the anemia is selected from various anemia disorders including cancer-associated anemia, chemotherapy-induced anemia, chronic kidney disease-associated anemia, iron-deficiency anemia, thalassemia, sickle cell disease, aplastic anemia and myelodysplastic syndromes.

[0268] In another aspect, the present disclosure provides methods of treating pain in a subject, comprising administering a therapeutically effective amount of the pharmaceutical compositions of the invention to a subject in need thereof. In one embodiment, the subject is a human subject. In various embodiments, the pain is selected from neuropathic pain, inflammatory pain, or cancer pain.

[0269] In another aspect, the present disclosure provides a method of treating aging in a subject, comprising administering to the subject a therapeutically effective amount (either as monotherapy or in a combination therapy regimen) of an isolated protein of the present disclosure in pharmaceutically acceptable carrier. In various embodiments, the aging condition is selected from the group consisting of: frailty of the elderly, age-related sarcopenia, and osteoarthritis.

[0270] In another aspect, the present disclosure provides methods of inducing stem cell growth for tissue repair or organ regeneration in a subject, comprising administering to the subject a therapeutically effective amount (either as monotherapy or in a combination therapy regimen) of an isolated protein of the present disclosure in pharmaceutically acceptable carrier. In various embodiments, the stem cell is selected from the group consisting of: muscle stem (satellite) cell, cardiac stem cell, bone marrow-derived mesynchymal stem cell and pluripotent stem cell.

[0271] In various embodiments, the present disclosure provides for a method of inhibiting loss of muscle mass and/or muscle function in a subject comprising administering an effective amount of an isolated protein into the subject. The modulation may attenuate the loss of the muscle mass and/or function of the subject by at least 5%, 10%, at least 25%, at least 50%, at least 75%, or at least 90%. The inhibition of loss of muscle mass and function can be evaluated by using imaging techniques and physical strength tests. Examples of imaging techniques for muscle mass evaluation include Dual-Energy X-Ray Absorptiometry (DEXA), Magnetic Resonance Imaging (MRI), and Computed Tomography (CT). Examples of muscle function tests include grip strength test, stair climbing test, short physical performance battery (SPPB) and 6-minute walk, as well as maximal inspiratory pressure (MIP) and maximal expiratory pressure (MEP) that are used to measure respiratory muscle strength.

[0272] “Therapeutically effective amount” or “therapeutically effective dose” refers to that amount of the therapeutic agent being administered which will relieve to some extent one or more of the symptoms of the disorder being treated.

[0273] A therapeutically effective dose can be estimated initially from cell culture assays by determining an IC50. A dose can then be formulated in animal models to achieve a circulating plasma concentration range that includes the IC50 as determined in cell culture. Such information can be used to more accurately determine useful doses in humans. Levels in plasma may be measured, for example, by HPLC. The exact composition, route of administration and dosage can be chosen by the individual physician in view of the subject's condition.

[0274] Dosage regimens can be adjusted to provide the optimum desired response (e.g., a therapeutic or prophylactic response). For example, a single bolus can be administered, several divided doses (multiple or repeat or maintenance) can be administered over time and the dose can be proportionally reduced or increased as indicated by the exigencies of the therapeutic situation. It is especially advantageous to formulate parenteral compositions in dosage unit form for ease of administration and uniformity of dosage. Dosage unit form as used herein refers to physically discrete units suited as unitary dosages for the mammalian subjects to be treated; each unit containing a predetermined quantity of active compound calculated to produce the desired therapeutic effect in association with the required pharmaceutical carrier. The specification for the dosage unit forms of the present disclosure will be dictated primarily by the unique characteristics of the antibody and the particular therapeutic or prophylactic effect to be achieved.

[0275] Thus, the skilled artisan would appreciate, based upon the disclosure provided herein, that the dose and dosing regimen is adjusted in accordance with methods well-known in the therapeutic arts. That is, the maximum tolerable dose can be readily established, and the effective amount providing a detectable therapeutic benefit to a subject may also be determined, as can the temporal requirements for administering each agent to provide a detectable therapeutic benefit to the subject. Accordingly, while certain dose and administration regimens are exemplified herein, these examples in no way limit the dose and administration regimen that may be provided to a subject in practicing the present disclosure.

[0276] It is to be noted that dosage values may vary with the type and severity of the condition to be alleviated, and may include single or multiple doses. It is to be further understood that for any particular subject, specific dosage regimens should be adjusted over time according to the individual need and the professional judgment of the person administering or supervising the administration of the compositions, and that dosage ranges set forth herein are exemplary only and are not intended to limit the scope or practice of the claimed composition. Further, the dosage regimen with the compositions of this disclosure may be based on a variety of factors, including the type of disease, the age, weight, sex, medical condition of the subject, the severity of the condition, the route of administration, and the particular antibody employed. Thus, the dosage regimen can vary widely, but can be determined routinely using standard methods. For example, doses may be adjusted based on pharmacokinetic or pharmacodynamic parameters, which may include clinical effects such as toxic effects and/or laboratory values. Thus, the present disclosure encompasses intra-subject dose-escalation as determined by the skilled artisan. Determining appropriate dosages and regimens are well-known in the relevant art and would be understood to be encompassed by the skilled artisan once provided the teachings disclosed herein.

[0277] An exemplary, non-limiting daily dosing range for a therapeutically or prophylactically effective amount of an isolated protein of the disclosure can be 0.001 to 100 mg/kg, 0.001 to 90 mg/kg, 0.001 to 80 mg/kg, 0.001 to 70 mg/kg, 0.001 to 60 mg/kg, 0.001 to 50 mg/kg, 0.001 to 40 mg/kg, 0.001 to 30 mg/kg, 0.001 to 20 mg/kg, 0.001 to 10 mg/kg, 0.001 to 5 mg/kg, 0.001 to 4 mg/kg, 0.001 to 3 mg/kg, 0.001 to 2 mg/kg, 0.001 to 1 mg/kg, 0.010 to 50 mg/kg, 0.010 to 40 mg/kg, 0.010 to 30 mg/kg, 0.010 to 20 mg/kg, 0.010 to 10 mg/kg, 0.010 to 5 mg/kg, 0.010 to 4 mg/kg, 0.010 to 3 mg/kg, 0.010 to 2 mg/kg, 0.010 to 1 mg/kg, 0.1 to 50 mg/kg, 0.1 to 40 mg/kg, 0.1 to 30 mg/kg, 0.1 to 20 mg/kg, 0.1 to 10 mg/kg, 0.1 to 5 mg/kg, 0.1 to 4 mg/kg, 0.1 to 3 mg/kg, 0.1 to 2 mg/kg, 0.1 to 1 mg/kg, 1 to 50 mg/kg, 1 to 40 mg/kg, 1 to 30 mg/kg, 1 to 20 mg/kg, 1 to 10 mg/kg, 1 to 5 mg/kg, 1 to 4 mg/kg, 1 to 3 mg/kg, 1 to 2 mg/kg, or 1 to 1 mg/kg body weight. It is to be noted that dosage values may vary with the type and severity of the conditions to be alleviated. It is to be further understood that for any particular subject, specific dosage regimens should be adjusted over time according to the individual need and the professional judgment of the person administering or supervising the administration of the compositions, and that dosage ranges set forth herein are exemplary only and are not intended to limit the scope or practice of the claimed composition.

[0278] In various embodiments, the total dose administered will achieve a plasma antibody concentration in the range of, e.g., about 1 to 1000 μg/ml, about 1 to 750 μg/ml, about 1 to 500 μg/ml, about 1 to 250 μg/ml, about 10 to 1000 μg/ml, about 10 to 750 μg/ml, about 10 to 500 μg/ml, about 10 to 250 μg/ml, about 20 to 1000 μg/ml, about 20 to 750 μg/ml, about 20 to 500 μg/ml, about 20 to 250 μg/ml, about 30 to 1000 μg/ml, about 30 to 750 μg/ml, about 30 to 500 μg/ml, about 30 to 250 μg/ml.

[0279] Toxicity and therapeutic index of the pharmaceutical compositions of the disclosure can be determined by standard pharmaceutical procedures in cell cultures or experimental animals, e.g., for determining the LD50 (the dose lethal to 50% of the population) and the ED50 (the dose therapeutically effective in 50% of the population). The dose ratio between toxic and therapeutic effective dose is the therapeutic index and it can be expressed as the ratio LD50/ED50. Compositions that exhibit large therapeutic indices are generally preferred.

[0280] The dosing frequency of the administration of the isolated protein pharmaceutical composition depends on the nature of the therapy and the particular disease being treated. The subject can be treated at regular intervals, such as weekly or monthly, until a desired therapeutic result is achieved. Exemplary dosing frequencies include, but are not limited to: once weekly without break; once weekly, every other week; once every 2 weeks; once every 3 weeks; weakly without break for 2 weeks, then monthly; weakly without break for 3 weeks, then monthly; monthly; once every other month; once every three months; once every four months; once every five months; or once every six months, or yearly.

### Combination Therapy

[0281] The isolated proteins and related compositions according to the present disclosure may be used in combination therapies. As used herein, the terms “co-administration”, “co-administered” and “in combination with”, referring to the an isolated protein of the disclosure and one or more other therapeutic agents, is intended to mean, and does refer to and include the following: simultaneous administration of such combination of an isolated protein of the disclosure and therapeutic agent(s) to a subject in need of treatment, when such components are formulated together into a single dosage form which releases said components at substantially the same time to said subject; substantially simultaneous administration of such combination of an isolated protein of the disclosure and therapeutic agent(s) to a subject in need of treatment, when such components are formulated apart from each other into separate dosage forms which are taken at substantially the same time by said subject, whereupon said components are released at substantially the same time to said subject; sequential administration of such combination of an isolated protein of the disclosure and therapeutic agent(s) to a subject in need of treatment, when such components are formulated apart from each other into separate dosage forms which are taken at consecutive times by said subject with a significant time interval between each administration, whereupon said components are released at substantially different times to said subject; and sequential administration of such combination of an isolated protein of the disclosure and therapeutic agent(s) to a subject in need of treatment, when such components are formulated together into a single dosage form which releases said components in a controlled manner whereupon they are concurrently, consecutively, and/or overlappingly released at the same and/or different times to said subject, where each part may be administered by either the same or a different route.

[0282] In another aspect, the present disclosure relates to methods of treating muscle wasting diseases in a subject, comprising administration of a combination of a) a therapeutically effective amount of an isolated protein of the present disclosure; and b) a second agent. This combination therapy may be particularly effective against a muscle wasting disease that is resistant or refractory to treatment using the second agent alone. In various embodiments, second agent is selected from growth hormone, ghrelin, IGF1, insulin, prednisone, corticosteroid therapy, androgen-deprivation therapy, anabolic steroids, antagonists to angiotensin or angiotensin receptor, antagonists to inflammatory cytokines such as TNF-alpha, IL-6, IL-1 and their receptors, and other antagonists to myostatin, activin A or another member of the TGF-beta family and to their receptors, bisphosphonates, RANKL inhibitors, agonists of peroxisome proliferator-activated receptors, β2 agonists, activator of PGC-1alpha, proteasome inhibitors, cancer therapeutics, chemotherapeutic agents, cell therapy, stem cell therapy, gene therapy, gene targeting therapy, and antisense oligonucleotide therapy.

[0283] The second agent composition may be administered to the subject prior to, concurrently with, or subsequent to administration of the pharmaceutical composition comprising the isolated protein. In various embodiments, the combination therapy comprises administering an isolated protein and the second agent composition simultaneously, either in the same pharmaceutical composition or in separate pharmaceutical composition. In various embodiments, a pharmaceutical composition comprising the isolated protein and the second agent may be administered sequentially, e.g., the pharmaceutical composition is administered either prior to or after the administration of the second agent composition.

[0284] In various embodiments, the administrations of an isolated protein composition and the second agent composition are concurrent, e.g., the administration period of an isolated protein composition and the second agent composition overlap with each other.

[0285] In various embodiments, the administrations of an isolated protein composition and the second agent composition are non-concurrent. For example, in various embodiments, the administration of an isolated protein composition is terminated before the second agent composition is administered. In various embodiments, the administration second agent composition is terminated before an isolated protein composition is administered.

### EXAMPLES

### Example 1

[0286] In this example, the preparation of an isolated protein comprising a mutant soluble ActRIIB-ECD polypeptide fused with an Fc domain is generally described. The mutant soluble ActRIIB-ECD polypeptide was designed by substituting the asparagine corresponding to position N18 of SEQ ID NO: 29 with a glutamine (Q).

[0287] The isolated protein is a construct as depicted in FIG. 2B. As shown in FIG. 2B, the protein may form a dimer of two monomers. Each monomer prepared in this example comprises a mutant soluble ActRIIB-ECD (SEQ ID NO: 146, which comprises the N18Q mutation compared to the soluble ActRIIB-ECD of SEQ ID NO: 29), a peptide linker sequence, a hinge linker sequence, and an Fc domain. The construct has three O-linked glycosylation sites and two N-linked glycosylation sites (at N41 and N194) with the glycosylation site at amino acid 18 removed by the N18Q mutation. The construct in FIG. 2B has a N18Q mutation compared to the construct in FIG. 2A, which has three N-linked glycosylation sites, at N18, N41, and N194.

[0288] DNA expression cassette encoding the mutant soluble ActRIIB-ECD polypeptide (SEQ ID NO: 146) was synthesized as a double stranded Gene fragment by IDT (Integrated DNA Technologies). Human Fc cassette (encoding SEQ ID NO: 43) was PCR amplified from its DNA template and the two DNA cassettes pieces were cloned into a mammalian expression vector using HIFI GIBSON Assembly master mix (New England Biolabs). The resulting construct encodes a fusion protein comprising a signal peptide leader sequence (SEQ ID NO: 49), a mutant soluble ActRIIB-ECD polypeptide (SEQ ID NO: 146), a peptide linker sequence (SEQ ID NO: 44), a hinge linker sequence (SEQ ID NO: 118), and an Fc domain sequence (SEQ ID NO: 43). The DNA sequence encoding this fusion protein comprises SEQ ID NO: 1652.

[0289] This plasmid was transfected into CHO cells using a lipid based transfection reagent. The transfected cells were grown in a culture medium. The fusion protein was secreted to the medium, which was collected for protein purification. The supernatants containing the secreted ActRIIB-huFc fusion protein were isolated by centrifuging and passing through a PES filter. The fusion protein was purified from the clarified medium by sequential chromatography steps on Protein A and Fractogel EMC TMAE anion exchange chromatography columns. FIG. 4 shows SDS-PAGE analysis of the column fractions. Fractionation 200-1 accounts for approximately 75% of the load. The purified protein runs as dimer as illustrated in FIG. 2B with a molecular weight of ˜90 kDa. Fraction 200-1 had the most of purified protein and was used for further testing (e.g., by the assays described in Example 3). The resulting ActRIIB-huFc fusion protein comprises the sequence of SEQ ID NO: 222, and generally forms dimers as illustrated in FIG. 2B. The mature fusion proteins generally lack the signal peptide leader sequence.

### Example 2

[0290] In this example, the preparation of an isolated protein comprising a mutant soluble ActRII-ECD polypeptide fused with an Fc domain is generally described. The mutant soluble ActRII-ECD polypeptide is designed by substituting the asparagine corresponding to position N18 of SEQ ID NO: 1 with glutamine. Besides the N18Q mutation, the mutant soluble ActRII-ECD polypeptide may comprise one or more additional mutations described in the disclosure.

[0291] The isolated protein is one of the constructs depicted in FIG. 2B. As shown in FIG. 2B, the protein may form a dimer of two monomers. Each monomer comprises a mutant soluble ActRII-ECD (with at least an N18Q mutation compared to the soluble ActRIIB-ECD of SEQ ID NO: 1 or the soluble ActRIIA-ECD of SEQ ID NO: 1654), a peptide linker sequence, a hinge linker sequence, and an Fc domain. The construct has three O-linked glycosylation sites and two N-linked glycosylation sites (at N41 and N194) with the glycosylation site at amino acid 18 removed by the N18Q mutation. The construct in FIG. 2B has a N18Q mutation compared to the construct in FIG. 2A, which has three N-linked glycosylation sites, at N18, N41, and N194.

[0292] DNA expression cassette encoding the mutant soluble ActRIIB-ECD polypeptide (e.g., any one of SEQ ID NO: 119, 120-145, 147-221, 329, 332, or 335) or mutant soluble ActRIIA-ECD polypeptide (e.g., any one of SEQ ID NO: 1655, 1656, or 1657) is synthesized as a double stranded Gene fragment by IDT (Integrated DNA Technologies). Human Fc cassette (encoding an Fc domain (e.g., any one of SEQ ID NO: 39, 41, or 43)) is PCR amplified from its DNA template and the two DNA cassettes pieces are cloned into a mammalian expression vector using HIFI GIBSON Assembly master mix (New England Biolabs). The resulting construct generates a fusion protein comprising a signal peptide leader sequence (e.g., SEQ ID NO: 49), a mutant soluble ActRII-ECD polypeptide (e.g., any one of SEQ ID NO: 119, 120-145, 147-221, 329, 332, 335, 1655, 1656, or 1657), a peptide linker sequence (SEQ ID NO: 44), a hinge linker sequence (SEQ ID NO: 118) and an Fc domain sequence (e.g., any one of SEQ ID NO: 39, 41, or 43).

[0293] This plasmid is transfected into CHO cells using a lipid based transfection reagent. This plasmid is transfected into CHO cells using a lipid based transfection reagent. The transfected cells are grown in a culture medium. The fusion protein is secreted to the medium, which is collected for protein purification. The supernatants containing the secreted ActRIIB-huFc fusion protein is isolated by centrifuging and passing through a PES filter. The fusion protein is purified from the clarified medium by sequential chromatography steps on Protein A and Fractogel EMC TMAE anion exchange chromatography columns. The purified protein runs as dimer as illustrated in FIG. 2B with a molecular weight of ˜90 kDa.

### Example 3

[0294] In this example, the myostatin binding activities of mutant ActRIIB polypeptide fusion proteins is evaluated.

[0295] Myostatin binding activities of mutant ActRIIB polypeptide fusion protein with N18Q mutation (SEQ ID NO: 119) as well as the corresponding ActRIIB polyppetide fusion protein without N18Q mutation (SEQ ID NO: 29) were analyzed using an ELISA assay. Results from the analysis are shown in Table 8 below. Batches of ActRIIB polypeptide fusion protein comprising soluble ActRIIB-ECD without the N18Q mutation (Sample #1 (used as reference when calculating potency), Sample #2, and #3) had varying levels of sialylation at the N18 position, and the inventors discovered that the soluble ActRIIB-ECD fusion proteins showed a reduction in potency with increased levels of sialylation. In contrast, the fusion protein with N18Q mutation in the soluble ActRIIB-ECD polypeptide produced in Example 1 (i.e., with SEQ ID NO: 222) (Sample #4) showed greater potency (e.g., myostatin binding) than the reference batch (Sample #1) and greater potency than either of the more highly sialylated batches (Samples #2 and #3). Percent sialylation was determined by mass spectrometry of the N18 peptide.

TABLE 8

| Sample | | N18 | Potency % of |
|---|---|---|---|
| # | Test sample | (% sialylation) | reference |
| 1 | Reference | 20 | 100 |
| 2 | Batch 2 | 75 | 79 |
| 3 | Batch 3 | 83 | 57 |
| 4 | N18Q mutant | 0 | 108 |

### Example 4

[0296] In this example, the myostatin binding activities of mutant ActRIIB and mutant ActRIIA polypeptide fusion proteins is evaluated. Without wishing to be bound by theory, it is expected that the absence of the glycosylation site corresponding to position N18 of SEQ ID NO: 1 reduces steric hinderance in the myostatin binding site of ActRII polypeptide fusion proteins. Accordingly, the inventors envision that removal of the N18 glysosylation site from various mutant ActRIIA and ActRIIB polypeptide fusion proteins will result in similar improvements to myostatin binding affinity.

[0297] Myostatin binding activities of various mutant ActRIIA and mutant ActRIIB polypeptide fusion proteins with N18Q mutation (e.g., fusion proteins comprising mutant soluble ActRIIB-ECD polypeptides comprising SEQ ID NOs: 119, 120-145, 147-221, 329, 332, or 335 or mutant soluble ActRIIA-ECD polypeptides comprising, e.g., SEQ ID NO: 1655, 1656, or 1675) as well as corresponding ActRIIB polypeptide fusion proteins without N18Q are analyzed using an ELISA assay. The mutant ActRIIA and mutant ActRIIB polypeptide fusion proteins with N18Q mutation are expected to display increased binding affinity for myostatin relative to the corresponding fusion proteins that lack the N18Q mutation (i.e., include a N-linked glycosylation site at position N18).

TABLE 9
Examples of sequences

| SEQ | | |
|---|---|---|
| ID | | |
| NO: | Notes | Sequences |
| 1 | Truncated wild- | ETRECIYYNANWELERTNQSGLERCEGEQDKRLHCYASWRNS |
| | type ActRIIB-ECD | SGTIELVKKGCWLDDFNCYDRQECVATEENPQVYFCCCEGNF |
| | (amino acids 25- | CNERFTHLPEAGGPEVTYEPPPTAPT |
| | 134 of SEQ ID NO: | |
| | 45) | |
| 45 | Full Length Amino | MTAPWVALALLWGSLCAGSGRGEAETRECIYYNANWELERT |
| | Acid Sequence of | NQSGLERCEGEQDKRLHCYASWRNSSGTIELVKKGCWLDDFN |
| | Human ActRIIB | CYDRQECVATEENPQVYFCCCEGNFCNERFTHLPEAGGPEVTY |
| | polypeptide | EPPPTAPTLLTVLAYSLLPIGGLSLIVLLAFWMYRHRKPPYGHV |
| | | DIHEDPGPPPPSPLVGLKPLQLLEIKARGRFGCVWKAQLMNDF |
| | | VAVKIFPLQDKQSWQSEREIFSTPGMKHENLLQFIAAEKRGSNL |
| | | EVELWLITAFHDKGSLTDYLKGNIITWNELCHVAETMSRGLSY |
| | | LHEDVPWCRGEGHKPSIAHRDFKSKNVLLKSDLTAVLADFGL |
| | | AVRFEPGKPPGDTHGQVGTRRYMAPEVLEGAINFQRDAFLRID |
| | | MYAMGLVLWELVSRCKAADGPVDEYMLPFEEEIGQHPSLEEL |
| | | QEVVVHKKMRPTIKDHWLKHPGLAQLCVTIEECWDHDAEAR |
| | | LSAGCVEERVSLIRRSVNGTTSDCLVSLVTSVTNVDLPPKESSI |
| 46 | Wild-type human | SGRGEAETRECIYYNANWELERTNQSGLERCEGEQDKRLHCY |
| | ActRIIB | ASWRNSSGTIELVKKGCWLDDFNCYDRQECVATEENPQVYFC |
| | extracellular | CCEGNFCNERFTHLPEAGGPEVTYEPPPTAPT |
| | domain (amino | |
| | acids 19-134 of | |
| | SEQ ID NO: 45) | |
| 47 | Full Length Amino | MGAATKLAFAVFLISCSSGAILGRSETQECIYYNANWEKDKTN |
| | Acid Sequence of | RSGIEPCYGDKDKRRHCFATWKNISGSIEIVKQGCWLDDINCY |
| | Human ActRIIA | DRNDCIEKKDSPEVFFCCCEGNMCNERFFYFPEMEVTQPTSNP |
| | polypeptide | VTPKPPLFNTLLYSLVPIMGIAVIVLFSFWMYRHHKLAYPPVLV |
| | | PTQDPGPPPPSPLMGLKPLQLLEIKARGRFGCVWKAQLLNEYV |
| | | AVKIFPIQDKQSWQNEYEIYSLPGMKHDNILQFIGAEKRGTSID |
| | | VDLWLITAFHEKGSLTDFLKANVVSWNELCHIAQTMARGLAY |
| | | LHEDIPGLKDGHKPAISHRDIKSKNVLLKNNLTACIADFGLALK |
| | | FEAGKSAGDTHGQVGTRRYMAPEVLEGAINFQRDAFLRIDMY |
| | | AMGLVLWELASRCTASDGPVDEYMLPFEEEIGQHPSLEDMQE |
| | | VVVHKKKRPVLRECWQKHSGMAMLCETIEECWDHDAEARLS |
| | | AGCVEERIIQMQKLTNIITTEDIVTVVTMVTNVDFPPKESSL |
| 48 | Wild-type human | AILGRSETQECLFFNANWEKDRTNQTGVEPCYGDKDKRRHCF |
| | ActRIIA | ATWKNISGSIEIVKQGCWLDDINCYDRTDCVEKKDSPEVYFCC |
| | extracellular | CEGNMCNEKFSYFPEMEVTQPTSNPVTPKPP |
| | domain (20-135 of | |
| | SEQ ID NO: 47) | |
| 119 | N18Q mutant of | ETRECIYYNANWELERTQQSGLERCEGEQDKRLHCYASWRNS |
| | truncated wild type | SGTIELVKKGCWLDDFNCYDRQECVATEENPQVYFCCCEGNF |
| | soluble ActRIIB- | CNERFTHLPEAGGPEVTYEPPPTAPT |
| | ECD (SEQ ID NO: | |
| | 1) | |
| 223 | N18X mutant of | ETRECIYYNANWELERTXQSGLERCEGEQDKRLHCYASWRNS |
| | wild type soluble | SGTIELVKKGCWLDDFNCYDRQECVATEENPQVYFCCCEGNF |
| | ActRIIB-ECD | CNERFTHLPEAGGPEVTYEPPPTAPT |
| | (SEQ ID NO: 1) | Wherein X is any amino acid that is not N |
| 2 | Truncated wild- | ETQECLFFNANWEKDRTNQTGVEPCYGDKDKRRHCFATWKNI |
| | type ActRIIA-ECD | SGSIEIVKQGCWLDDINCYDRTDCVEKKDSPEVYFCCCEGNMC |
| | | NEKFSYFPEMEVTQPTSNPVTPKPP |
| 3 | Hybrid hu- | ETRECIYYNANWELERTNQSGLERCYGDKDKRRHCYASWRNS |
| | ActRIIB-ECD | SGTIELVKKGCWLDDINCYDRTDCVEKKDSPEVYFCCCEGNFC |
| | (AG-0001) | NERFTHLPEAGGPEVTYEPPPTAPT |
| 4 | Hybrid hu- | ETRECIYYNANWELERTNQSGLERCYGDKDKRRHCYASWRNS |
| | ActRIIB-ECD | SGTIELVKKGCWLDDFNCYDRTDCVEKKDSPEVYFCCCEGNF |
| | (AG-0002) | CNERFTHLPEAGGPEVTYEPPPTAPT |
| 5 | Hybrid hu- | ETRECIYYNANWELERTNQSGLERCEGEQDKRLHCYASWRNS |
| | ActRIIB-ECD | SGTIELVKKGCWLDDINCYDRTDCVEKKDSPEVYFCCCEGNFC |
| | (AG-0003) | NERFTHLPEAGGPEVTYEPPPTAPT |
| 6 | Hybrid hu- | ETRECIYYNANWELERTNQSGLERCEGEQDKRLHCYASWRNS |
| | ActRIIB-ECD | SGTIELVKKGCWLDDINCYDRTDCVEKKDSPQVYFCCCEGNFC |
| | (AG-0004) | NERFTHLPEAGGPEVTYEPPPTAPT |
| 7 | Hybrid hu- | ETRECIYYNANWELERTNQSGLERCEGEQDKRLHCYASWRNS |
| | ActRIIB-ECD | SGTIELVKKGCWLDDFNCYDRTDCVEKKDSPQVYFCCCEGNF |
| | | CNERFTHLPEAGGPEVTYEPPPTAPT |
| 8 | Hybrid hu- | ETRECIYYNANWELERTNQSGLERCEGEQDKRLHCYASWRNS |
| | ActRIIB-ECD | SGTIELVKKGCWLDDFNCYDRTDCVEKKDSPEVYFCCCEGNF |
| | (AG-0006) | CNERFTHLPEAGGPEVTYEPPPTAPT |
| 9 | Hybrid hu- | ETRECIYYNANWELERTNQSGLERCEGEQDKRLHCYASWRNS |
| | ActRIIB-ECD | SGTIELVKKGCWLDDFNCYDRQECVEKKDSPEVYFCCCEGNF |
| | (AG-0007) | CNERFTHLPEAGGPEVTYEPPPTAPT |
| 10 | Hybrid hu- | ETRECIYYNANWELERTNQSGLERCEGEQDKRLHCYASWRNS |
| | ActRIIB-ECD | SGTIELVKKGCWLDDFNCYDRQECVEKKDSPQVYFCCCEGNF |
| | (AG-0008) | CNERFTHLPEAGGPEVTYEPPPTAPT |
| 11 | Hybrid human | TRECIYYNANWELERTNQSGLERCEGEQDKRLHCYASWRNSS |
| | ActRIIA-ECD | GTIELVKKGCWLDDINCYDRQECVEKKDSPEVYFCCCEGNFC |
| | (AG-0009) | NERFTHLPEAGGPEVTYEPPPTAPT |
| 12 | Hybrid hu- | ETRECIYYNANWELERTNQSGLERCEGEQDKRLHCYASWRNS |
| | ActRIIB-ECD | SGTIELVKKGCWLDDFNCYDRTDCVEKKDSPEVYFCCCEGNM |
| | (AG-0010) | CNERFTHLPEAGGPEVTYEPPPTAPT |
| 13 | Hybrid hu- | ETRECIYYNANWELERTNQSGLERCEGDQDKRLHCYASWRNS |
| | ActRIIB-ECD | SGTIELVKKGCWLDDFNCYDRQECVEKKDSPEVYFCCCEGNM |
| | (AG-0011) | CNERFTHLPEAGGPEVTYEPPPTAPT |
| 14 | Hybrid hu- | ETQECIYYNANWEKDRTNQTGVEPCYGDKDKRRHCYASWRN |
| | ActRIIB-ECD | SSGTIELVKKGCWLDDFNCYDRQECVATEENPQVYFCCCEGN |
| | (AG-0012) | FCNERFTHLPEAGGPEVTYEPPPTAPT |
| 15 | Hybrid hu- | ETQECIYYNANWEKDRTNQTGVEPCEGDQDKRLHCYASWRN |
| | ActRIIB-ECD | SSGTIELVKKGCWLDDFNCYDRQECVATEENPQVYFCCCEGN |
| | (AG-0013) | FCNERFTHLPEAGGPEVTYEPPPTAPT |
| 16 | Hybrid hu- | ETRECIYYNANWELERTNQSGLERCYGDKDKRRHCYASWRNS |
| | ActRIIB-ECD | SGTIELVKKGCWLDDFNCYDRQECVATEENPQVYFCCCEGNF |
| | (AG-0014) | CNERFTHLPEAGGPEVTYEPPPTAPT |
| 17 | Hybrid hu- | ETRECIYYNANWEKDRTNQTGVEPCEGDQDKRLHCYASWRN |
| | ActRIIB-ECD | SSGTIELVKKGCWLDDFNCYDRQECVATEENPQVYFCCCEGN |
| | (AG-0015) | FCNERFTHLPEAGGPEVTYEPPPTAPT |
| 18 | Hybrid hu- | ETQECIYYNANWEKDRTNQTGVEPCEGDQDKRLHCYASWRN |
| | ActRIIB-ECD | SSGTIELVKKGCWLDDFNCYDRQECVATEENPQVYFCCCEGN |
| | (AG-0016) | FCNERFTHLPEAGGPEVTYEPPPTAPT |
| 19 | Hybrid hu- | ETQECIYYNANWEKDRTNQTGLERCEGEQDKRLHCYASWRNS |
| | ActRIIB-ECD | SGTIELVKKGCWLDDFNCYDRQECVATEENPQVYFCCCEGNF |
| | (AG-0017) | CNERFTHLPEAGGPEVTYEPPPTAPT |
| 20 | Hybrid hu- | ETQECIYYNANWEKDRTNQSGLERCEGEQDKRLHCYASWRNS |
| | ActRIIB-ECD | SGTIELVKKGCWLDDFNCYDRQECVATEENPQVYFCCCEGNF |
| | (AG-0018) | CNERFTHLPEAGGPEVTYEPPPTAPT |
| 21 | Hybrid hu- | ETRECIYYNANWEKDRTNQSGLERCEGEQDKRLHCYASWRNS |
| | ActRIIB-ECD | SGTIELVKKGCWLDDFNCYDRQECVATEENPQVYFCCCEGNF |
| | (AG-0019) | CNERFTHLPEAGGPEVTYEPPPTAPT |
| 22 | Hybrid hu- | ETQECIYYNANWELERTNQSGLERCEGEQDKRLHCYASWRNS |
| | ActRIIB-ECD | SGTIELVKKGCWLDDFNCYDRQECVATEENPQVYFCCCEGNF |
| | (AG-0020) | CNERFTHLPEAGGPEVTYEPPPTAPT |
| 23 | Hybrid hu- | ETRECIYYNANWELERTNQSGLERCEGEQDKRLHCFATWRNS |
| | ActRIIB-ECD | SGTIELVKQGCWLDDFNCYDRQECVATEENPQVYFCCCEGNF |
| | (AG-0021) | CNERFTHLPEAGGPEVTYEPPPTAPT |
| 24 | Hybrid hu- | ETRECIYYNANWELERTNQSGLERCYGDKDKRRHCYASWRNS |
| | ActRIIB-ECD | SGTIELVKKGCWLDDINCYDRQECVATEENPQVYFCCCEGNFC |
| | (AG-0022) | NERFTHLPEAGGPEVTYEPPPTAPT |
| 25 | Hybrid hu- | ETRECIYYNANWELERTNQSGLERCEGEQDKRLHCYASWRNS |
| | ActRIIB-ECD | SGTIELVKKGCWLDDFNCYDRQECVATKENPQVYFCCCEGNF |
| | (AG-0023) | CNERFTHLPEAGGPEVTYEPPPTAPT |
| 26 | Hybrid hu- | ETRECIYYNANWELERTNQSGLERCEGEQDKRLHCYASWRNS |
| | ActRIIB-ECD | SGTIELVKKGCWLDDINCYDRQECVATEENPQVYFCCCEGNFC |
| | (AG-0024) | NERFTHLPEAGGPEVTYEPPPTAPT |
| 27 | Hybrid hu- | ETRECIYYNANWELERTNQSGLERCEGEQDKRLHCYASWRNS |
| | ActRIIB-ECD | SGTIELVKKGCWLDDINCYDRQECVATKENPQVYFCCCEGNF |
| | (AG-0025) | CNERFTHLPEAGGPEVTYEPPPTAPT |
| 28 | Hybrid hu- | ETRECIYYNANWELERTNQSGLERCEGDKDKRLHCYASWRNS |
| | ActRIIB-ECD | SGTIELVKKGCWLDDINCYDRQECVATKENPQVYFCCCEGNF |
| | (AG-0026) | CNERFTHLPEAGGPEVTYEPPPTAPT |
| 29 | Hybrid hu- | ETRECIYYNANWELERTNQSGLERCEGDQDKRLHCYASWRNS |
| | ActRIIB-ECD | SGTIELVKKGCWLDDINCYDRQECVATKENPQVYFCCCEGNF |
| | (AG-0027) | CNERFTHLPEAGGPEVTYEPPPTAPT |
| 30 | Hybrid hu- | ETRECIYYNANWELERTNQSGLERCEGDQDKRLHCYASWRNS |
| | ActRIIB-ECD | SGTIELVKKGCWLDDFNCYDRQECVATKENPQVYFCCCEGNF |
| | (AG-0028) | CNERFTHLPEAGGPEVTYEPPPTAPT |
| 31 | Hybrid hu- | ETRECIYYNANWELERTNQSGLERCEGDQDKRLHCYASWRNS |
| | ActRIIB-ECD | SGTIELVKKGCWLDDFNCYDRQECVATEENPQVYFCCCEGNF |
| | (AG-0029) | CNERFTHLPEAGGPEVTYEPPPTAPT |
| 32 | Hybrid hu- | ETRECIYYNANWELERTNQSGLERCYGDKDKRRHCYASWRNS |
| | ActRIIB-ECD | SGTIELVKKGCWLDDINCYDRQECVEKKDSPEVYFCCCEGNFC |
| | (AG-0030) | NERFTHLPEAGGPEVTYEPPPTAPT |
| 33 | Hybrid hu- | ETRECIFFNANWEKDRTNQTGVEPCEGEQDKRLHCYASWRNS |
| | ActRIIB-ECD | SGTIELVKKGCWLDDFNCYDRQECVATEENPQVYFCCCEGNF |
| | (AG-0031) | CNERFTHLPEAGGPEVTYEPPPTAPT |
| 34 | Hybrid hu- | ETRECIYYNANWELERTNQSGLERCEGEQDKRLHCFATWKNIS |
| | ActRIIB-ECD | GSIELVKQGCWLDDFNCYDRQECVATEENPQVYFCCCEGNFC |
| | (AG-0032) | NERFTHLPEAGGPEVTYEPPPTAPT |
| 35 | Hybrid hu- | ETRECIYYNANWELERTNQSGLERCEGEQDKRLHCYASWRNS |
| | ActRIIB-ECD | SGTIELVKKGCWLDDFNCYDRTDCVATEENPQVYFCCCEGNF |
| | (AG-0033) | CNERFTHLPEAGGPEVTYEPPPTAPT |
| 36 | Hybrid hu- | ETRECIYYNANWELERTNQSGLERCEGEQDKRLHCYASWRNS |
| | ActRIIB-ECD | SGTIELVKKGCWLDDFNCYDRQECVATEENPQVYFCCCEGNM |
| | (AG-0034) | CNERFTHLPEAGGPEVTYEPPPTAPT |
| 37 | Hybrid hu- | ETRECIYYNANWELERTNQSGLERCEGDQDKRLHCYASWRNS |
| | ActRIIB-ECD | SGTIELVKKGCWLDDINCYDRQECVATEENPQVYFCCCEGNFC |
| | (AG-0035) | NERFTHLPEAGGPEVTYEPPPTAPT |
| 51 | Hybrid hu- | ETQECLFFNANWEKDRTNQSGVEPCYGDKDKRRHCYASWRN |
| | ActRIIB-ECD | SSGTIELVKKGCWLDDFNCYDRQECVATEENPQVYFCCCEGN |
| | | FCNERFTHLPEAGGPEVTYEPPPTAPT |
| 52 | Hybrid hu- | ETQECLFFNANWEKDRINQSGVEPCEGEQDKRLHCYASWRNS |
| | ActRIIB-ECD | SGTIELVKKGCWLDDFNCYDRQECVATEENPQVYFCCCEGNF |
| | | CNERFTHLPEAGGPEVTYEPPPTAPT |
| 53 | Hybrid hu- | ETRECLFFNANWEKDRTNQSGVEPCEGEQDKRLHCYASWRNS |
| | ActRIIB-ECD | SGTIELVKKGCWLDDFNCYDRQECVATEENPQVYFCCCEGNF |
| | | CNERFTHLPEAGGPEVTYEPPPTAPT |
| 54 | Hybrid hu- | ETQECLFFNANWEKDRTNQSGVEPCYGEQDKRLHCYASWRNS |
| | ActRIIB-ECD | SGTIELVKKGCWLDDFNCYDRQECVATEENPQVYFCCCEGNF |
| | | CNERFTHLPEAGGPEVTYEPPPTAPT |
| 55 | Hybrid hu- | ETRECLFFNANWEKDRTNQSGVEPCYGDKDKRRHCYASWRN |
| | ActRIIB-ECD | SSGTIELVKKGCWLDDFNCYDRQECVATEENPQVYFCCCEGN |
| | | FCNERFTHLPEAGGPEVTYEPPPTAPT |
| 56 | Hybrid hu- | ETRECLFFNANWEKDRTNQTGVEPCYGDKDKRRHCFATWKNI |
| | ActRIIB-ECD | SGSIEIVKQGCWLDDFNCYDRQECVATEENPQVYFCCCEGNFC |
| | | NERFTHLPEAGGPEVTYEPPPTAPT |
| 57 | Hybrid hu- | ETRECLFFNANWEKDRTNQTGVEPCYGDKDKRRHCFATWKNI |
| | ActRIIB-ECD | SGSIEIVKQGCWLDDINCYDRQECVATEENPQVYFCCCEGNFC |
| | | NERFTHLPEAGGPEVTYEPPPTAPT |
| 58 | Hybrid hu- | ETRECLFFNANWEKDRTNQTGVEPCYGDKDKRRHCFATWKNI |
| | ActRIIB-ECD | SGSIEIVKQGCWLDDINCYDRTDCVEKKDSPEVYFCCCEGNFC |
| | | NERFTHLPEAGGPEVTYEPPPTAPT |
| 59 | Hybrid hu- | ETQECIYYNANWELERTNQSGLERCYGDKDKRRHCFATWKNI |
| | ActRIIB-ECD | SGSIEIVKQGCWLDDINCYDRQECVATEENPQVYFCCCEGNFC |
| | | NERFTHLPEAGGPEVTYEPPPTAPT |
| 60 | Hybrid hu- | ETRECIYYNANWELERTNQSGLERCYGDKDKRRHCFATWKNI |
| | ActRIIB-ECD | SGSIEIVKQGCWLDDINCYDRTDCVEKKDSPEVYFCCCEGNFC |
| | | NERFTHLPEAGGPEVTYEPPPTAPT |
| 61 | Hybrid hu- | ETRECIYYNANWELERTNQSGLERCYGDKDKRRHCFATWKNI |
| | ActRIIB-ECD | SGSIEIVKQGCWLDDINCYDRTDCVEKKDSPEVYFCCCEGNMC |
| | | NERFTHLPEAGGPEVTYEPPPTAPT |
| 62 | Hybrid hu- | ETRECIYYNANWELERTNQSGLERCEGEQDKRLHCFATWKNIS |
| | ActRIIB-ECD | GSIEIVKQGCWLDDINCYDRTDCVEKKDSPEVYFCCCEGNFCN |
| | | ERFTHLPEAGGPEVTYEPPPTAPT |
| 63 | Hybrid hu- | ETRECIYYNANWELERTNQSGLERCEGEQDKRLHCFATWKNIS |
| | ActRIIB-ECD | GSIEIVKQGCWLDDINCYDRTDCVATEENPQVYFCCCEGNFCN |
| | | ERFTHLPEAGGPEVTYEPPPTAPT |
| 64 | Hybrid hu- | ETRECIYYNANWELERTNQSGLERCEGEQDKRLHCFATWKNIS |
| | ActRIIB-ECD | GSIEIVKQGCWLDDFNCYDRTDCVATEENPQVYFCCCEGNFCN |
| | | ERFTHLPEAGGPEVTYEPPPTAPT |
| 65 | Hybrid hu- | ETRECIYYNANWELERTNQSGLERCEGEQDKRLHCFATWKNIS |
| | ActRIIB-ECD | GSIEIVKQGCWLDDFNCYDRQECVATEENPQVYFCCCEGNFCN |
| | | ERFTHLPEAGGPEVTYEPPPTAPT |
| 66 | Hybrid hu- | ETQECIYYNANWELERTNQSGLERCYGDKDKRRHCYASWRNS |
| | ActRIIB-ECD | SGTIELVKKGCWLDDINCYDRTDCVEKKDSPEVYFCCCEGNFC |
| | | NERFTHLPEAGGPEVTYEPPPTAPT |
| 67 | Hybrid hu- | ETQECIYYNANWELERTNQSGLERCYGDKDKRRHCYASWRNS |
| | ActRIIB-ECD | SGTIELVKKGCWLDDINCYDRTDCVEKKDSPEVYFCCCEGNM |
| | | CNERFTHLPEAGGPEVTYEPPPTAPT |
| 68 | Hybrid hu- | ETQECIYYNANWELERTNQSGLERCYGDKDKRRHCFATWKNI |
| | ActRIIB-ECD | SGSIEIVKQGCWLDDINCYDRTDCVEKKDSPEVYFCCCEGNMC |
| | | NERFTHLPEAGGPEVTYEPPPTAPT |
| 69 | Hybrid hu- | ETQECIYYNANWELERTNQSGLERCYGDKDKRRHCFATWKNI |
| | ActRIIB-ECD | SGSIEIVKQGCWLDDINCYDRTDCVEKKDSPEVYFCCCEGNFC |
| | | NERFTHLPEAGGPEVTYEPPPTAPT |
| 70 | Hybrid hu- | ETRECLFFNANWEKDRTNQTGVEPCEGEQDKRLHCFATWKNI |
| | ActRIIB-ECD | SGSIEIVKQGCWLDDINCYDRTDCVEKKDSPEVYFCCCEGNFC |
| | | NERFTHLPEAGGPEVTYEPPPTAPT |
| 71 | Hybrid hu- | ETRECLFFNANWEKDRTNQSGVEPCEGEQDKRLHCYASWRNS |
| | ActRIIB-ECD | SGTIELVKKGCWLDDINCYDRTDCVEKKDSPEVYFCCCEGNFC |
| | | NERFTHLPEAGGPEVTYEPPPTAPT |
| 72 | Hybrid hu- | ETRECLFFNANWEKDRTNQSGVEPCYGDKDKRRHCYASWRN |
| | ActRIIB-ECD | SSGTIELVKKGCWLDDINCYDRTDCVEKKDSPEVYFCCCEGNF |
| | | CNERFTHLPEAGGPEVTYEPPPTAPT |
| 73 | Hybrid hu- | ETRECIYYNANWELERTNQSGLERCYGDKDKRRHCYASWRNS |
| | ActRIIB-ECD | SGTIELVKKGCWLDDFNCYDRTDCVATEENPQVYFCCCEGNF |
| | | CNERFTHLPEAGGPEVTYEPPPTAPT |
| 74 | Hybrid hu- | ETRECIYYNANWELERTNQSGLERCYGDKDKRRHCYASWRNS |
| | ActRIIB-ECD | SGTIELVKQGCWLDDFNCYDRTDCVATEENPQVYFCCCEGNF |
| | | CNERFTHLPEAGGPEVTYEPPPTAPT |
| 75 | Hybrid hu- | ETRECIYYNANWELERTNQSGLERCYGDKDKRRHCYASWRNS |
| | ActRIIB-ECD | SGTIEIVKKGCWLDDFNCYDRTDCVATEENPQVYFCCCEGNFC |
| | | NERFTHLPEAGGPEVTYEPPPTAPT |
| 76 | Hybrid hu- | ETRECIYYNANWELERTNQSGLERCYGDKDKRRHCYASWRNS |
| | ActRIIB-ECD | SGSIELVKKGCWLDDFNCYDRTDCVATEENPQVYFCCCEGNF |
| | | CNERFTHLPEAGGPEVTYEPPPTAPT |
| 77 | Hybrid hu- | ETRECIYYNANWELERTNQSGLERCYGDKDKRRHCYASWRNS |
| | ActRIIB-ECD | SGSIEIVKKGCWLDDFNCYDRTDCVATEENPQVYFCCCEGNFC |
| | | NERFTHLPEAGGPEVTYEPPPTAPT |
| 78 | Hybrid hu- | ETRECIYYNANWELERTNQSGLERCYGDKDKRRHCYASWRNS |
| | ActRIIB-ECD | SGSIEIVKQGCWLDDFNCYDRTDCVATEENPQVYFCCCEGNFC |
| | | NERFTHLPEAGGPEVTYEPPPTAPT |
| 79 | Hybrid hu- | ETRECIYYNANWELERTNQSGLERCEGEQDKRLHCYASWRNS |
| | ActRIIB-ECD | SGTIELVKKGCWLDDFNCYDRTDCVATEENPQVYFCCCEGNF |
| | | CNERFTHLPEAGGPEVTYEPPPTAPT |
| 80 | Hybrid hu- | ETRECIYYNANWELERTNQSGLERCEGEQDKRLHCYASWRNS |
| | ActRIIB-ECD | SGTIELVKKGCWLDDFNCYDRQECVATEENPQVYFCCCEGNF |
| | | CNEKFSYFPEMEVTQPTSNPVTPKPP |
| 81 | Hybrid hu- | ETRECIYYNANWELERTNQSGLERCEGEQDKRLHCYASWRNS |
| | ActRIIB-ECD | SGTIELVKKGCWLDDFNCYDRQECVATEENPQVYFCCCEGNF |
| | | CNEKFSYFPQMEVTQPTSNPVTPKPP |
| 82 | Hybrid hu- | ETRECIYYNANWELERTNQSGLERCYGDKDKRRHCYASWRNS |
| | ActRIIB-ECD | SGTIELVKKGCWLDDINCYDRTDCVEKKDSPEVYFCCCEGNFC |
| | | NEKFSYFPEMEVTQPTSNPVTPKPP |
| 83 | Hybrid hu- | ETRECIYYNANWELERTNQSGLERCYGDKDKRRHCYASWRNS |
| | ActRIIB-ECD | SGTIELVKKGCWLDDINCYDRTDCVEKKDSPEVYFCCCEGNFC |
| | | NEKFSYFPQMEVTQPTSNPVTPKPP |
| 84 | Hybrid hu- | ETRECIYYNANWELERTNQSGLERCYGDKDKRRHCYASWRNS |
| | ActRIIB-ECD | SGTIELVKKGCWLDDFNCYDRQECVATEENPQVYFCCCEGNF |
| | | CNEKFSYFPQMEVTQPTSNPVTPKPP |
| 85 | Hybrid hu- | ETRECIYYNANWELERTNQSGLERCYGDKDKRRHCYASWRNS |
| | ActRIIB-ECD | SGTIELVKQGCWLDDFNCYDRQECVATEENPQVYFCCCEGNF |
| | | CNEKFSYFPQMEVTQPTSNPVTPKPP |
| 86 | Hybrid hu- | ETRECIYYNANWELERTNQSGLERCYGDKDKRRHCYASWRNS |
| | ActRIIB-ECD | SGTIEIVKKGCWLDDFNCYDRQECVATKENPQVYFCCCEGNFC |
| | | NEKFSYFPQMEVTQPTSNPVTPKPP |
| 87 | Hybrid hu- | ETRECIYYNANWELERTNQSGLERCYGDKDKRRHCYASWRNS |
| | ActRIIB-ECD | SGSIELVKKGCWLDDFNCYDRQECVATKENPQVYFCCCEGNF |
| | | CNEKFSYFPQMEVTQPTSNPVTPKPP |
| 88 | Hybrid hu- | ETRECIYYNANWELERTNQSGLERCEGEQDKRLHCYASWRNS |
| | ActRIIB-ECD | SGSIELVKKGCWLDDFNCYDRQECVATEENPQVYFCCCEGNF |
| | | CNEKFSYFPQMEVTQPTSNPVTPKPP |
| 89 | Hybrid hu- | ETRECIYYNANWELERTNQSGLERCEGEQDKRLHCYASWRNS |
| | ActRIIB-ECD | SGTIEIVKKGCWLDDFNCYDRQECVATEENPQVYFCCCEGNFC |
| | | NEKFSYFPQMEVTQPTSNPVTPKPP |
| 90 | Hybrid hu- | ETRECIYYNANWELERTNQSGLERCEGEQDKRLHCYASWRNS |
| | ActRIIB-ECD | SGTIELVKQGCWLDDFNCYDRQECVATEENPQVYFCCCEGNF |
| | | CNEKFSYFPQMEVTQPTSNPVTPKPP |
| 91 | Hybrid hu- | ETRECIYYNANWELERTNQSGLERCEGEQDKRLHCYASWRNS |
| | ActRIIB-ECD | SGTIELVKKGCWLDDFNCYDRQECVETEENPQVYFCCCEGNF |
| | | CNEKFSYFPQMEVTQPTSNPVTPKPP |
| 92 | Hybrid hu- | ETRECIYYNANWELERTNQSGLERCEGEQDKRLHCYASWRNS |
| | ActRIIB-ECD | SGTIELVKKGCWLDDFNCYDRQECVAKEENPQVYFCCCEGNF |
| | | CNEKFSYFPQMEVTQPTSNPVTPKPP |
| 93 | Hybrid hu- | ETRECIYYNANWELERTNQSGLERCEGEQDKRLHCYASWRNS |
| | ActRIIB-ECD | SGTIELVKKGCWLDDFNCYDRQECVATKENPQVYFCCCEGNF |
| | | CNEKFSYFPQMEVTQPTSNPVTPKPP |
| 94 | Hybrid hu- | ETRECIYYNANWELERTNQSGLERCEGEQDKRLHCYASWRNS |
| | ActRIIB-ECD | SGTIELVKKGCWLDDFNCYDRQECVATEDNPQVYFCCCEGNF |
| | | CNEKFSYFPQMEVTQPTSNPVTPKPP |
| 95 | Hybrid hu- | ETRECIYYNANWELERTNQSGLERCEGEQDKRLHCYASWRNS |
| | ActRIIB-ECD | SGTIELVKKGCWLDDFNCYDRQECVATEESPQVYFCCCEGNFC |
| | | NEKFSYFPQMEVTQPTSNPVTPKPP |
| 96 | Hybrid hu- | ETRECIYYNANWELERTNQSGLERCEGEQDKRLHCYASWRNS |
| | ActRIIB-ECD | SGTIELVKKGCWLDDFNCYDRQECVATEENPEVYFCCCEGNF |
| | | CNEKFSYFPQMEVTQPTSNPVTPKPP |
| 97 | Hybrid hu- | ETRECIYYNANWELERTNQSGLERCEGDKDKRLHCYASWRNS |
| | ActRIIB-ECD | SGTIELVKKGCWLDDFNCYDRQECVETEENPQVYFCCCEGNF |
| | | CNEKFSYFPQMEVTQPTSNPVTPKPP |
| 98 | Hybrid hu- | ETRECIYYNANWELERTNQSGLERCEGEKDKRLHCYASWRNS |
| | ActRIIB-ECD | SGTIELVKKGCWLDDFNCYDRQECVAKEENPQVYFCCCEGNF |
| | | CNEKFSYFPQMEVTQPTSNPVTPKPP |
| 99 | Hybrid hu- | ETRECIYYNANWELERTNQSGLERCEGDQDKRLHCYASWRNS |
| | ActRIIB-ECD | SGTIELVKKGCWLDDFNCYDRQECVATKENPQVYFCCCEGNF |
| | | CNEKFSYFPQMEVTQPTSNPVTPKPP |
| 100 | Hybrid hu- | ETRECIYYNANWELERTNQSGLERCEGDKDKRLHCYASWRNS |
| | ActRIIB-ECD | SGTIELVKQGCWLDDFNCYDRQECVAKKENPQVYFCCCEGNF |
| | | CNEKFSYFPQMEVTQPTSNPVTPKPP |
| 101 | Hybrid hu- | ETRECIYYNANWELERTNQSGLERCEGDKDKRLHCYASWRNS |
| | ActRIIB-ECD | SGTIEIVKQGCWLDDFNCYDRQECVAEKENPQVYFCCCEGNFC |
| | | NEKFSYFPQMEVTQPTSNPVTPKPP |
| 102 | Hybrid hu- | ETRECIYYNANWELERTNQSGLERCYGDQDKRLHCYASWRNS |
| | ActRIIB-ECD | SGSIEIVKQGCWLDDFNCYDRQECVAKKENPQVYFCCCEGNF |
| | | CNEKFSYFPQMEVTQPTSNPVTPKPP |
| 103 | Hybrid hu- | ETRECIYYNANWELERTNQSGLERCEGEKDKRRHCYASWRNS |
| | ActRIIB-ECD | SGTIEIVKKGCWLDDFNCYDRQECVATKENPQVYFCCCEGNFC |
| | | NEKFSYFPQMEVTQPTSNPVTPKPP |
| 104 | Hybrid hu- | ETRECIYYNANWELERTNQSGLERCYGDQDKRRHCYASWRNS |
| | ActRIIB-ECD | SGTIELVKKGCWLDDFNCYDRQECVATEENPEVYFCCCEGNF |
| | | CNEKFSYFPQMEVTQPTSNPVTPKPP |
| 105 | Hybrid hu- | ETRECIYYNANWELERTNQSGLERCEGEQDKRRHCYASWRNS |
| | ActRIIB-ECD | SGTIELVKKGCWLDDFNCYDRQECVATEENPQVYFCCCEGNF |
| | | CNEKFSYFPQMEVTQPTSNPVTPKPP |
| 106 | Hybrid hu- | ETRECIYYNANWELERTNQSGLERCYGEQDKRLHCYASWRNS |
| | ActRIIB-ECD | SGSIEIVKKGCWLDDFNCYDRTDCVATEENPQVYFCCCEGNFC |
| | | NEKFSYFPQMEVTQPTSNPVTPKPP |
| 107 | Hybrid hu- | ETRECIYYNANWELERTNQSGLERCEGEQDKRRHCYASWRNS |
| | ActRIIB-ECD | SGSIELVKKGCWLDDFNCYDRQECVAKEENPQVYFCCCEGNF |
| | | CNEKFSYFPQMEVTQPTSNPVTPKPP |
| 108 | Hybrid hu- | ETRECIYYNANWELERTNQSGLERCEGEQDKRRHCYASWRNS |
| | ActRIIB-ECD | SGTIEIVKKGCWLDDFNCYDRQECVAKEENPQVYFCCCEGNFC |
| | | NEKFSYFPQMEVTQPTSNPVTPKPP |
| 109 | Hybrid hu- | ETRECIYYNANWELERTNQSGLERCEGEQDKRRHCYASWRNS |
| | ActRIIB-ECD | SGSIEIVKKGCWLDDFNCYDRQECVATKENPQVYFCCCEGNFC |
| | | NEKFSYFPQMEVTQPTSNPVTPKPP |
| 110 | Hybrid hu- | ETRECIYYNANWELERTNQSGLERCEGDQDKRLHCYASWRNS |
| | ActRIIB-ECD | SGTIEIVKKGCWLDDFNCYDRQECVATKENPQVYFCCCEGNFC |
| | | NEKFSYFPQMEVTQPTSNPVTPKPP |
| 111 | Hybrid hu- | ETRECIYYNANWELERTNQSGLERCEGDQDKRLHCYASWRNS |
| | ActRIIB-ECD | SGSIELVKKGCWLDDFNCYDRQECVATKENPQVYFCCCEGNF |
| | | CNEKFSYFPQMEVTQPTSNPVTPKPP |
| 112 | Hybrid hu- | ETRECIYYNANWELERTNQSGLERCEGDQDKRLHCYASWRNS |
| | ActRIIB-ECD | SGTIELVKKGCWLDDFNCYDRQECVATKENPQVYFCCCEGNF |
| | | CNEKFSYFPQMEVTQPTSNPVTPKPP |
| 113 | Hybrid hu- | ETRECIYYNANWELERTNQSGLERCEGEQDKRLHCYASWRNS |
| | ActRIIB-ECD | SGTIEIVKKGCWLDDFNCYDRQECVATKENPQVYFCCCEGNFC |
| | | NEKFSYFPQMEVTQPTSNPVTPKPP |
| 114 | Hybrid hu- | ETRECIYYNANWELERTNQSGLERCEGEQDKRLHCYASWRNS |
| | ActRIIB-ECD | SGTIELVKKGCWLDDFNCYDRQECVATKENPQVYFCCCEGNF |
| | | CNEKFSYFPQMEVTQPTSNPVTPKPP |
| 115 | Hybrid hu- | ETRECIYYNANWELERTNQSGLERCEGDQDKRLHCYASWRNS |
| | ActRIIB-ECD | SGTIEIVKKGCWLDDFNCYDRQECVAKKENPQVYFCCCEGNF |
| | | CNEKFSYFPQMEVTQPTSNPVTPKPP |
| 116 | Hybrid hu- | ETQECLFFNANWEKDRTNQTGVEPCYGDKDKRRHCFATWKNI |
| | ActRIIB-ECD | SGSIEIVKQGCWLDDINCYDRTDCVEKKDSPEVYFCCCEGNMC |
| | | NERFTHLPEAGGPEVTYEPPPTAPT |
| 117 | Hybrid hu- | ETRECIYYNANWELERTNQSGLERCYGDKDKRRHCYASWRNS |
| | ActRIIB-ECD | SGTIELVKKGCWLDDINCYDRQECVATKENPQVYFCCCEGNF |
| | | CNERFTHLPEAGGPEVTYEPPPTAPT |
| 120 | N18Q mutant of | ETRECIYYNANWELERTQQSGLERCYGDKDKRRHCYASWRNS |
| | SEQ ID NO: 3 | SGTIELVKKGCWLDDINCYDRTDCVEKKDSPEVYFCCCEGNFC |
| | | NERFTHLPEAGGPEVTYEPPPTAPT |
| 121 | N18Q mutant of | ETRECIYYNANWELERTQQSGLERCYGDKDKRRHCYASWRNS |
| | SEQ ID NO: 4 | SGTIELVKKGCWLDDFNCYDRTDCVEKKDSPEVYFCCCEGNF |
| | | CNERFTHLPEAGGPEVTYEPPPTAPT |
| 122 | N18Q mutant of | ETRECIYYNANWELERTQQSGLERCEGEQDKRLHCYASWRNS |
| | SEQ ID NO: 5 | SGTIELVKKGCWLDDINCYDRTDCVEKKDSPEVYFCCCEGNFC |
| | | NERFTHLPEAGGPEVTYEPPPTAPT |
| 123 | N18Q mutant of | ETRECIYYNANWELERTQQSGLERCEGEQDKRLHCYASWRNS |
| | SEQ ID NO: 6 | SGTIELVKKGCWLDDINCYDRTDCVEKKDSPQVYFCCCEGNFC |
| | | NERFTHLPEAGGPEVTYEPPPTAPT |
| 124 | N18Q mutant of | ETRECIYYNANWELERTQQSGLERCEGEQDKRLHCYASWRNS |
| | SEQ ID NO: 7 | SGTIELVKKGCWLDDFNCYDRTDCVEKKDSPQVYFCCCEGNF |
| | | CNERFTHLPEAGGPEVTYEPPPTAPT |
| 125 | N18Q mutant of | ETRECIYYNANWELERTQQSGLERCEGEQDKRLHCYASWRNS |
| | SEQ ID NO: 8 | SGTIELVKKGCWLDDFNCYDRTDCVEKKDSPEVYFCCCEGNF |
| | | CNERFTHLPEAGGPEVTYEPPPTAPT |
| 126 | N18Q mutant of | ETRECIYYNANWELERTQQSGLERCEGEQDKRLHCYASWRNS |
| | SEQ ID NO: 9 | SGTIELVKKGCWLDDFNCYDRQECVEKKDSPEVYFCCCEGNF |
| | | CNERFTHLPEAGGPEVTYEPPPTAPT |
| 127 | N18Q mutant of | ETRECIYYNANWELERTQQSGLERCEGEQDKRLHCYASWRNS |
| | SEQ ID NO: 10 | SGTIELVKKGCWLDDFNCYDRQECVEKKDSPQVYFCCCEGNF |
| | | CNERFTHLPEAGGPEVTYEPPPTAPT |
| 128 | N18Q mutant of | TRECIYYNANWELERTQQSGLERCEGEQDKRLHCYASWRNSS |
| | SEQ ID NO: 11 | GTIELVKKGCWLDDINCYDRQECVEKKDSPEVYFCCCEGNFC |
| | | NERFTHLPEAGGPEVTYEPPPTAPT |
| 129 | N18Q mutant of | ETRECIYYNANWELERTQQSGLERCEGEQDKRLHCYASWRNS |
| | SEQ ID NO: 12 | SGTIELVKKGCWLDDFNCYDRTDCVEKKDSPEVYFCCCEGNM |
| | | CNERFTHLPEAGGPEVTYEPPPTAPT |
| 130 | N18Q mutant of | ETRECIYYNANWELERTQQSGLERCEGDQDKRLHCYASWRNS |
| | SEQ ID NO: 13 | SGTIELVKKGCWLDDFNCYDRQECVEKKDSPEVYFCCCEGNM |
| | | CNERFTHLPEAGGPEVTYEPPPTAPT |
| 131 | N18Q mutant of | ETQECIYYNANWEKDRTQQTGVEPCYGDKDKRRHCYASWRN |
| | SEQ ID NO: 14 | SSGTIELVKKGCWLDDFNCYDRQECVATEENPQVYFCCCEGN |
| | | FCNERFTHLPEAGGPEVTYEPPPTAPT |
| 132 | N18Q mutant of | ETQECIYYNANWEKDRTQQTGVEPCEGDQDKRLHCYASWRN |
| | SEQ ID NO: 15 | SSGTIELVKKGCWLDDFNCYDRQECVATEENPQVYFCCCEGN |
| | | FCNERFTHLPEAGGPEVTYEPPPTAPT |
| 133 | N18Q mutant of | ETRECIYYNANWELERTQQSGLERCYGDKDKRRHCYASWRNS |
| | SEQ ID NO: 16 | SGTIELVKKGCWLDDFNCYDRQECVATEENPQVYFCCCEGNF |
| | | CNERFTHLPEAGGPEVTYEPPPTAPT |
| 134 | N18Q mutant of | ETRECIYYNANWEKDRTQQTGVEPCEGDQDKRLHCYASWRN |
| | SEQ ID NO: 17 | SSGTIELVKKGCWLDDFNCYDRQECVATEENPQVYFCCCEGN |
| | | FCNERFTHLPEAGGPEVTYEPPPTAPT |
| 135 | N18Q mutant of | ETQECIYYNANWEKDRTQQTGVEPCEGDQDKRLHCYASWRN |
| | SEQ ID NO: 18 | SSGTIELVKKGCWLDDFNCYDRQECVATEENPQVYFCCCEGN |
| | | FCNERFTHLPEAGGPEVTYEPPPTAPT |
| 136 | N18Q mutant of | ETQECIYYNANWEKDRTQQTGLERCEGEQDKRLHCYASWRNS |
| | SEQ ID NO: | SGTIELVKKGCWLDDFNCYDRQECVATEENPQVYFCCCEGNF |
| | | CNERFTHLPEAGGPEVTYEPPPTAPT |
| 137 | N18Q mutant of | ETQECIYYNANWEKDRTQQSGLERCEGEQDKRLHCYASWRNS |
| | SEQ ID NO: 20 | SGTIELVKKGCWLDDFNCYDRQECVATEENPQVYFCCCEGNF |
| | | CNERFTHLPEAGGPEVTYEPPPTAPT |
| 138 | N18Q mutant of | ETRECIYYNANWEKDRTQQSGLERCEGEQDKRLHCYASWRNS |
| | SEQ ID NO: 21 | SGTIELVKKGCWLDDFNCYDRQECVATEENPQVYFCCCEGNF |
| | | CNERFTHLPEAGGPEVTYEPPPTAPT |
| 139 | N18Q mutant of | ETQECIYYNANWELERTQQSGLERCEGEQDKRLHCYASWRNS |
| | SEQ ID NO: 22 | SGTIELVKKGCWLDDFNCYDRQECVATEENPQVYFCCCEGNF |
| | | CNERFTHLPEAGGPEVTYEPPPTAPT |
| 140 | N18Q mutant of | ETRECIYYNANWELERTQQSGLERCEGEQDKRLHCFATWRNS |
| | SEQ ID NO: 23 | SGTIELVKQGCWLDDFNCYDRQECVATEENPQVYFCCCEGNF |
| | | CNERFTHLPEAGGPEVTYEPPPTAPT |
| 141 | N18Q mutant of | ETRECIYYNANWELERTQQSGLERCYGDKDKRRHCYASWRNS |
| | SEQ ID NO: 24 | SGTIELVKKGCWLDDINCYDRQECVATEENPQVYFCCCEGNFC |
| | | NERFTHLPEAGGPEVTYEPPPTAPT |
| 142 | N18Q mutant of | ETRECIYYNANWELERTQQSGLERCEGEQDKRLHCYASWRNS |
| | SEQ ID NO: 25 | SGTIELVKKGCWLDDFNCYDRQECVATKENPQVYFCCCEGNF |
| | | CNERFTHLPEAGGPEVTYEPPPTAPT |
| 143 | N18Q mutant of | ETRECIYYNANWELERTQQSGLERCEGEQDKRLHCYASWRNS |
| | SEQ ID NO: 26 | SGTIELVKKGCWLDDINCYDRQECVATEENPQVYFCCCEGNFC |
| | | NERFTHLPEAGGPEVTYEPPPTAPT |
| 144 | N18Q mutant of | ETRECIYYNANWELERTQQSGLERCEGEQDKRLHCYASWRNS |
| | SEQ ID NO: 27 | SGTIELVKKGCWLDDINCYDRQECVATKENPQVYFCCCEGNF |
| | | CNERFTHLPEAGGPEVTYEPPPTAPT |
| 145 | N18Q mutant of | ETRECIYYNANWELERTQQSGLERCEGDKDKRLHCYASWRNS |
| | SEQ ID NO: 28 | SGTIELVKKGCWLDDINCYDRQECVATKENPQVYFCCCEGNF |
| | | CNERFTHLPEAGGPEVTYEPPPTAPT |
| 146 | N18Q mutant of | ETRECIYYNANWELERTQQSGLERCEGDQDKRLHCYASWRNS |
| | SEQ ID NO: 29 | SGTIELVKKGCWLDDINCYDRQECVATKENPQVYFCCCEGNF |
| | | CNERFTHLPEAGGPEVTYEPPPTAPT |
| 147 | N18Q mutant of | ETRECIYYNANWELERTQQSGLERCEGDQDKRLHCYASWRNS |
| | SEQ ID NO: 30 | SGTIELVKKGCWLDDFNCYDRQECVATKENPQVYFCCCEGNF |
| | | CNERFTHLPEAGGPEVTYEPPPTAPT |
| 148 | N18Q mutant of | ETRECIYYNANWELERTQQSGLERCEGDQDKRLHCYASWRNS |
| | SEQ ID NO: 31 | SGTIELVKKGCWLDDFNCYDRQECVATEENPQVYFCCCEGNF |
| | | CNERFTHLPEAGGPEVTYEPPPTAPT |
| 149 | N18Q mutant of | ETRECIYYNANWELERTQQSGLERCYGDKDKRRHCYASWRNS |
| | SEQ ID NO: 32 | SGTIELVKKGCWLDDINCYDRQECVEKKDSPEVYFCCCEGNFC |
| | | NERFTHLPEAGGPEVTYEPPPTAPT |
| 150 | N18Q mutant of | ETRECIFFNANWEKDRTQQTGVEPCEGEQDKRLHCYASWRNS |
| | SEQ ID NO: 33 | SGTIELVKKGCWLDDFNCYDRQECVATEENPQVYFCCCEGNF |
| | | CNERFTHLPEAGGPEVTYEPPPTAPT |
| 151 | N18Q mutant of | ETRECIYYNANWELERTQQSGLERCEGEQDKRLHCFATWKNIS |
| | SEQ ID NO: 34 | GSIELVKQGCWLDDFNCYDRQECVATEENPQVYFCCCEGNFC |
| | | NERFTHLPEAGGPEVTYEPPPTAPT |
| 152 | N18Q mutant of | ETRECIYYNANWELERTQQSGLERCEGEQDKRLHCYASWRNS |
| | SEQ ID NO: 35 | SGTIELVKKGCWLDDFNCYDRTDCVATEENPQVYFCCCEGNF |
| | | CNERFTHLPEAGGPEVTYEPPPTAPT |
| 153 | N18Q mutant of | ETRECIYYNANWELERTQQSGLERCEGEQDKRLHCYASWRNS |
| | SEQ ID NO: 36 | SGTIELVKKGCWLDDFNCYDRQECVATEENPQVYFCCCEGNM |
| | | CNERFTHLPEAGGPEVTYEPPPTAPT |
| 154 | N18Q mutant of | ETRECIYYNANWELERTQQSGLERCEGDQDKRLHCYASWRNS |
| | SEQ ID NO: 37 | SGTIELVKKGCWLDDINCYDRQECVATEENPQVYFCCCEGNFC |
| | | NERFTHLPEAGGPEVTYEPPPTAPT |
| 155 | N18Q mutant of | ETQECLFFNANWEKDRTQQSGVEPCYGDKDKRRHCYASWRN |
| | SEQ ID NO: 51 | SSGTIELVKKGCWLDDFNCYDRQECVATEENPQVYFCCCEGN |
| | | FCNERFTHLPEAGGPEVTYEPPPTAPT |
| 156 | N18Q mutant of | ETQECLFFNANWEKDRTQQSGVEPCEGEQDKRLHCYASWRNS |
| | SEQ ID NO: 52 | SGTIELVKKGCWLDDFNCYDRQECVATEENPQVYFCCCEGNF |
| | | CNERFTHLPEAGGPEVTYEPPPTAPT |
| 157 | N18Q mutant of | ETRECLFFNANWEKDRTQQSGVEPCEGEQDKRLHCYASWRNS |
| | SEQ ID NO: 53 | SGTIELVKKGCWLDDFNCYDRQECVATEENPQVYFCCCEGNF |
| | | CNERFTHLPEAGGPEVTYEPPPTAPT |
| 158 | N18Q mutant of | ETQECLFFNANWEKDRTQQSGVEPCYGEQDKRLHCYASWRNS |
| | SEQ ID NO: 54 | SGTIELVKKGCWLDDFNCYDRQECVATEENPQVYFCCCEGNF |
| | | CNERFTHLPEAGGPEVTYEPPPTAPT |
| 159 | N18Q mutant of | ETRECLFFNANWEKDRTQQSGVEPCYGDKDKRRHCYASWRN |
| | SEQ ID NO: 55 | SSGTIELVKKGCWLDDFNCYDRQECVATEENPQVYFCCCEGN |
| | | FCNERFTHLPEAGGPEVTYEPPPTAPT |
| 160 | N18Q mutant of | ETRECLFFNANWEKDRTQQTGVEPCYGDKDKRRHCFATWKNI |
| | SEQ ID NO: 56 | SGSIEIVKQGCWLDDFNCYDRQECVATEENPQVYFCCCEGNFC |
| | | NERFTHLPEAGGPEVTYEPPPTAPT |
| 161 | N18Q mutant of | ETRECLFFNANWEKDRTQQTGVEPCYGDKDKRRHCFATWKNI |
| | SEQ ID NO: 57 | SGSIEIVKQGCWLDDINCYDRQECVATEENPQVYFCCCEGNFC |
| | | NERFTHLPEAGGPEVTYEPPPTAPT |
| 162 | N18Q mutant of | ETRECLFFNANWEKDRTQQTGVEPCYGDKDKRRHCFATWKNI |
| | SEQ ID NO: 58 | SGSIEIVKQGCWLDDINCYDRTDCVEKKDSPEVYFCCCEGNFC |
| | | NERFTHLPEAGGPEVTYEPPPTAPT |
| 163 | N18Q mutant of | ETQECIYYNANWELERTQQSGLERCYGDKDKRRHCFATWKNI |
| | SEQ ID NO: 59 | SGSIEIVKQGCWLDDINCYDRQECVATEENPQVYFCCCEGNFC |
| | | NERFTHLPEAGGPEVTYEPPPTAPT |
| 164 | N18Q mutant of | ETRECIYYNANWELERTQQSGLERCYGDKDKRRHCFATWKNI |
| | SEQ ID NO: 60 | SGSIEIVKQGCWLDDINCYDRTDCVEKKDSPEVYFCCCEGNFC |
| | | NERFTHLPEAGGPEVTYEPPPTAPT |
| 165 | N18Q mutant of | ETRECIYYNANWELERTQQSGLERCYGDKDKRRHCFATWKNI |
| | SEQ ID NO: 61 | SGSIEIVKQGCWLDDINCYDRTDCVEKKDSPEVYFCCCEGNMC |
| | | NERFTHLPEAGGPEVTYEPPPTAPT |
| 166 | N18Q mutant of | ETRECIYYNANWELERTQQSGLERCEGEQDKRLHCFATWKNIS |
| | SEQ ID NO: 62 | GSIEIVKQGCWLDDINCYDRTDCVEKKDSPEVYFCCCEGNFCN |
| | | ERFTHLPEAGGPEVTYEPPPTAPT |
| 167 | N18Q mutant of | ETRECIYYNANWELERTQQSGLERCEGEQDKRLHCFATWKNIS |
| | SEQ ID NO: 63 | GSIEIVKQGCWLDDINCYDRTDCVATEENPQVYFCCCEGNFCN |
| | | ERFTHLPEAGGPEVTYEPPPTAPT |
| 168 | N18Q mutant of | ETRECIYYNANWELERTQQSGLERCEGEQDKRLHCFATWKNIS |
| | SEQ ID NO: 64 | GSIEIVKQGCWLDDFNCYDRTDCVATEENPQVYFCCCEGNFCN |
| | | ERFTHLPEAGGPEVTYEPPPTAPT |
| 169 | N18Q mutant of | ETRECIYYNANWELERTQQSGLERCEGEQDKRLHCFATWKNIS |
| | SEQ ID NO: 65 | GSIEIVKQGCWLDDFNCYDRQECVATEENPQVYFCCCEGNFCN |
| | | ERFTHLPEAGGPEVTYEPPPTAPT |
| 170 | N18Q mutant of | ETQECIYYNANWELERTQQSGLERCYGDKDKRRHCYASWRNS |
| | SEQ ID NO: 66 | SGTIELVKKGCWLDDINCYDRTDCVEKKDSPEVYFCCCEGNFC |
| | | NERFTHLPEAGGPEVTYEPPPTAPT |
| 171 | N18Q mutant of | ETQECIYYNANWELERTQQSGLERCYGDKDKRRHCYASWRNS |
| | SEQ ID NO: 67 | SGTIELVKKGCWLDDINCYDRTDCVEKKDSPEVYFCCCEGNM |
| | | CNERFTHLPEAGGPEVTYEPPPTAPT |
| 172 | N18Q mutant of | ETQECIYYNANWELERTQQSGLERCYGDKDKRRHCFATWKNI |
| | SEQ ID NO: 68 | SGSIEIVKQGCWLDDINCYDRTDCVEKKDSPEVYFCCCEGNMC |
| | | NERFTHLPEAGGPEVTYEPPPTAPT |
| 173 | N18Q mutant of | ETQECIYYNANWELERTQQSGLERCYGDKDKRRHCFATWKNI |
| | SEQ ID NO: 69 | SGSIEIVKQGCWLDDINCYDRTDCVEKKDSPEVYFCCCEGNFC |
| | | NERFTHLPEAGGPEVTYEPPPTAPT |
| 174 | N18Q mutant of | ETRECLFFNANWEKDRTQQTGVEPCEGEQDKRLHCFATWKNI |
| | SEQ ID NO: 70 | SGSIEIVKQGCWLDDINCYDRTDCVEKKDSPEVYFCCCEGNFC |
| | | NERFTHLPEAGGPEVTYEPPPTAPT |
| 175 | N18Q mutant of | ETRECLFFNANWEKDRTQQSGVEPCEGEQDKRLHCYASWRNS |
| | SEQ ID NO: 71 | SGTIELVKKGCWLDDINCYDRTDCVEKKDSPEVYFCCCEGNFC |
| | | NERFTHLPEAGGPEVTYEPPPTAPT |
| 176 | N18Q mutant of | ETRECLFFNANWEKDRTQQSGVEPCYGDKDKRRHCYASWRN |
| | SEQ ID NO: 72 | SSGTIELVKKGCWLDDINCYDRTDCVEKKDSPEVYFCCCEGNF |
| | | CNERFTHLPEAGGPEVTYEPPPTAPT |
| 177 | N18Q mutant of | ETRECIYYNANWELERTQQSGLERCYGDKDKRRHCYASWRNS |
| | SEQ ID NO: 73 | SGTIELVKKGCWLDDFNCYDRTDCVATEENPQVYFCCCEGNF |
| | | CNERFTHLPEAGGPEVTYEPPPTAPT |
| 178 | N18Q mutant of | ETRECIYYNANWELERTQQSGLERCYGDKDKRRHCYASWRNS |
| | SEQ ID NO: 74 | SGTIELVKQGCWLDDFNCYDRTDCVATEENPQVYFCCCEGNF |
| | | CNERFTHLPEAGGPEVTYEPPPTAPT |
| 179 | N18Q mutant of | ETRECIYYNANWELERTQQSGLERCYGDKDKRRHCYASWRNS |
| | SEQ ID NO: 75 | SGTIEIVKKGCWLDDFNCYDRTDCVATEENPQVYFCCCEGNFC |
| | | NERFTHLPEAGGPEVTYEPPPTAPT |
| 180 | N18Q mutant of | ETRECIYYNANWELERTQQSGLERCYGDKDKRRHCYASWRNS |
| | SEQ ID NO: 76 | SGSIELVKKGCWLDDFNCYDRTDCVATEENPQVYFCCCEGNF |
| | | CNERFTHLPEAGGPEVTYEPPPTAPT |
| 181 | N18Q mutant of | ETRECIYYNANWELERTQQSGLERCYGDKDKRRHCYASWRNS |
| | SEQ ID NO: 77 | SGSIEIVKKGCWLDDFNCYDRTDCVATEENPQVYFCCCEGNFC |
| | | NERFTHLPEAGGPEVTYEPPPTAPT |
| 182 | N18Q mutant of | ETRECIYYNANWELERTQQSGLERCYGDKDKRRHCYASWRNS |
| | SEQ ID NO: 78 | SGSIEIVKQGCWLDDFNCYDRTDCVATEENPQVYFCCCEGNFC |
| | | NERFTHLPEAGGPEVTYEPPPTAPT |
| 183 | N18Q mutant of | ETRECIYYNANWELERTQQSGLERCEGEQDKRLHCYASWRNS |
| | SEQ ID NO: 79 | SGTIELVKKGCWLDDFNCYDRTDCVATEENPQVYFCCCEGNF |
| | | CNERFTHLPEAGGPEVTYEPPPTAPT |
| 184 | N18Q mutant of | ETRECIYYNANWELERTQQSGLERCEGEQDKRLHCYASWRNS |
| | SEQ ID NO: 80 | SGTIELVKKGCWLDDFNCYDRQECVATEENPQVYFCCCEGNF |
| | | CNEKFSYFPEMEVTQPTSNPVTPKPP |
| 185 | N18Q mutant of | ETRECIYYNANWELERTQQSGLERCEGEQDKRLHCYASWRNS |
| | SEQ ID NO: 81 | SGTIELVKKGCWLDDFNCYDRQECVATEENPQVYFCCCEGNF |
| | | CNEKFSYFPQMEVTQPTSNPVTPKPP |
| 186 | N18Q mutant of | ETRECIYYNANWELERTQQSGLERCYGDKDKRRHCYASWRNS |
| | SEQ ID NO: 82 | SGTIELVKKGCWLDDINCYDRTDCVEKKDSPEVYFCCCEGNFC |
| | | NEKFSYFPEMEVTQPTSNPVTPKPP |
| 187 | N18Q mutant of | ETRECIYYNANWELERTQQSGLERCYGDKDKRRHCYASWRNS |
| | SEQ ID NO: 83 | SGTIELVKKGCWLDDINCYDRTDCVEKKDSPEVYFCCCEGNFC |
| | | NEKFSYFPQMEVTQPTSNPVTPKPP |
| 188 | N18Q mutant of | ETRECIYYNANWELERTQQSGLERCYGDKDKRRHCYASWRNS |
| | SEQ ID NO: 84 | SGTIELVKKGCWLDDFNCYDRQECVATEENPQVYFCCCEGNF |
| | | CNEKFSYFPQMEVTQPTSNPVTPKPP |
| 189 | N18Q mutant of | ETRECIYYNANWELERTQQSGLERCYGDKDKRRHCYASWRNS |
| | SEQ ID NO: 85 | SGTIELVKQGCWLDDFNCYDRQECVATEENPQVYFCCCEGNF |
| | | CNEKFSYFPQMEVTQPTSNPVTPKPP |
| 190 | N18Q mutant of | ETRECIYYNANWELERTQQSGLERCYGDKDKRRHCYASWRNS |
| | SEQ ID NO: 86 | SGTIEIVKKGCWLDDFNCYDRQECVATKENPQVYFCCCEGNFC |
| | | NEKFSYFPQMEVTQPTSNPVTPKPP |
| 191 | N18Q mutant of | ETRECIYYNANWELERTQQSGLERCYGDKDKRRHCYASWRNS |
| | SEQ ID NO: 87 | SGSIELVKKGCWLDDFNCYDRQECVATKENPQVYFCCCEGNF |
| | | CNEKFSYFPQMEVTQPTSNPVTPKPP |
| 192 | N18Q mutant of | ETRECIYYNANWELERTQQSGLERCEGEQDKRLHCYASWRNS |
| | SEQ ID NO: 88 | SGSIELVKKGCWLDDFNCYDRQECVATEENPQVYFCCCEGNF |
| | | CNEKFSYFPQMEVTQPTSNPVTPKPP |
| 193 | N18Q mutant of | ETRECIYYNANWELERTQQSGLERCEGEQDKRLHCYASWRNS |
| | SEQ ID NO: 89 | SGTIEIVKKGCWLDDFNCYDRQECVATEENPQVYFCCCEGNFC |
| | | NEKFSYFPQMEVTQPTSNPVTPKPP |
| 194 | N18Q mutant of | ETRECIYYNANWELERTQQSGLERCEGEQDKRLHCYASWRNS |
| | SEQ ID NO: 90 | SGTIELVKQGCWLDDFNCYDRQECVATEENPQVYFCCCEGNF |
| | | CNEKFSYFPQMEVTQPTSNPVTPKPP |
| 195 | N18Q mutant of | ETRECIYYNANWELERTQQSGLERCEGEQDKRLHCYASWRNS |
| | SEQ ID NO: 91 | SGTIELVKKGCWLDDFNCYDRQECVETEENPQVYFCCCEGNF |
| | | CNEKFSYFPQMEVTQPTSNPVTPKPP |
| 196 | N18Q mutant of | ETRECIYYNANWELERTQQSGLERCEGEQDKRLHCYASWRNS |
| | SEQ ID NO: 92 | SGTIELVKKGCWLDDFNCYDRQECVAKEENPQVYFCCCEGNF |
| | | CNEKFSYFPQMEVTQPTSNPVTPKPP |
| 197 | N18Q mutant of | ETRECIYYNANWELERTQQSGLERCEGEQDKRLHCYASWRNS |
| | SEQ ID NO: 93 | SGTIELVKKGCWLDDFNCYDRQECVATKENPQVYFCCCEGNF |
| | | CNEKFSYFPQMEVTQPTSNPVTPKPP |
| 198 | N18Q mutant of | ETRECIYYNANWELERTQQSGLERCEGEQDKRLHCYASWRNS |
| | SEQ ID NO: 94 | SGTIELVKKGCWLDDFNCYDRQECVATEDNPQVYFCCCEGNF |
| | | CNEKFSYFPQMEVTQPTSNPVTPKPP |
| 199 | N18Q mutant of | ETRECIYYNANWELERTQQSGLERCEGEQDKRLHCYASWRNS |
| | SEQ ID NO: 95 | SGTIELVKKGCWLDDFNCYDRQECVATEESPQVYFCCCEGNFC |
| | | NEKFSYFPQMEVTQPTSNPVTPKPP |
| 200 | N18Q mutant of | ETRECIYYNANWELERTQQSGLERCEGEQDKRLHCYASWRNS |
| | SEQ ID NO: 96 | SGTIELVKKGCWLDDFNCYDRQECVATEENPEVYFCCCEGNF |
| | | CNEKFSYFPQMEVTQPTSNPVTPKPP |
| 201 | N18Q mutant of | ETRECIYYNANWELERTQQSGLERCEGDKDKRLHCYASWRNS |
| | SEQ ID NO: 97 | SGTIELVKKGCWLDDFNCYDRQECVETEENPQVYFCCCEGNF |
| | | CNEKFSYFPQMEVTQPTSNPVTPKPP |
| 202 | N18Q mutant of | ETRECIYYNANWELERTQQSGLERCEGEKDKRLHCYASWRNS |
| | SEQ ID NO: 98 | SGTIELVKKGCWLDDFNCYDRQECVAKEENPQVYFCCCEGNF |
| | | CNEKFSYFPQMEVTQPTSNPVTPKPP |
| 203 | N18Q mutant of | ETRECIYYNANWELERTQQSGLERCEGDQDKRLHCYASWRNS |
| | SEQ ID NO: 99 | SGTIELVKKGCWLDDFNCYDRQECVATKENPQVYFCCCEGNF |
| | | CNEKFSYFPQMEVTQPTSNPVTPKPP |
| 204 | N18Q mutant of | ETRECIYYNANWELERTQQSGLERCEGDKDKRLHCYASWRNS |
| | SEQ ID NO: 100 | SGTIELVKQGCWLDDFNCYDRQECVAKKENPQVYFCCCEGNF |
| | | CNEKFSYFPQMEVTQPTSNPVTPKPP |
| 205 | N18Q mutant of | ETRECIYYNANWELERTQQSGLERCEGDKDKRLHCYASWRNS |
| | SEQ ID NO: 101 | SGTIEIVKQGCWLDDFNCYDRQECVAEKENPQVYFCCCEGNFC |
| | | NEKFSYFPQMEVTQPTSNPVTPKPP |
| 206 | N18Q mutant of | ETRECIYYNANWELERTQQSGLERCYGDQDKRLHCYASWRNS |
| | SEQ ID NO: 102 | SGSIEIVKQGCWLDDFNCYDRQECVAKKENPQVYFCCCEGNF |
| | | CNEKFSYFPQMEVTQPTSNPVTPKPP |
| 207 | N18Q mutant of | ETRECIYYNANWELERTQQSGLERCEGEKDKRRHCYASWRNS |
| | SEQ ID NO: 103 | SGTIEIVKKGCWLDDFNCYDRQECVATKENPQVYFCCCEGNFC |
| | | NEKFSYFPQMEVTQPTSNPVTPKPP |
| 208 | N18Q mutant of | ETRECIYYNANWELERTQQSGLERCYGDQDKRRHCYASWRNS |
| | SEQ ID NO: 104 | SGTIELVKKGCWLDDFNCYDRQECVATEENPEVYFCCCEGNF |
| | | CNEKFSYFPQMEVTQPTSNPVTPKPP |
| 209 | N18Q mutant of | ETRECIYYNANWELERTQQSGLERCEGEQDKRRHCYASWRNS |
| | SEQ ID NO: 105 | SGTIELVKKGCWLDDFNCYDRQECVATEENPQVYFCCCEGNF |
| | | CNEKFSYFPQMEVTQPTSNPVTPKPP |
| 210 | N18Q mutant of | ETRECIYYNANWELERTQQSGLERCYGEQDKRLHCYASWRNS |
| | SEQ ID NO: 106 | SGSIEIVKKGCWLDDFNCYDRTDCVATEENPQVYFCCCEGNFC |
| | | NEKFSYFPQMEVTQPTSNPVTPKPP |
| 211 | N18Q mutant of | ETRECIYYNANWELERTQQSGLERCEGEQDKRRHCYASWRNS |
| | SEQ ID NO: 107 | SGSIELVKKGCWLDDFNCYDRQECVAKEENPQVYFCCCEGNF |
| | | CNEKFSYFPQMEVTQPTSNPVTPKPP |
| 212 | N18Q mutant of | ETRECIYYNANWELERTQQSGLERCEGEQDKRRHCYASWRNS |
| | SEQ ID NO: 108 | SGTIEIVKKGCWLDDFNCYDRQECVAKEENPQVYFCCCEGNFC |
| | | NEKFSYFPQMEVTQPTSNPVTPKPP |
| 213 | N18Q mutant of | ETRECIYYNANWELERTQQSGLERCEGEQDKRRHCYASWRNS |
| | SEQ ID NO: 109 | SGSIEIVKKGCWLDDFNCYDRQECVATKENPQVYFCCCEGNFC |
| | | NEKFSYFPQMEVTQPTSNPVTPKPP |
| 214 | N18Q mutant of | ETRECIYYNANWELERTQQSGLERCEGDQDKRLHCYASWRNS |
| | SEQ ID NO: 110 | SGTIEIVKKGCWLDDFNCYDRQECVATKENPQVYFCCCEGNFC |
| | | NEKFSYFPQMEVTQPTSNPVTPKPP |
| 215 | N18Q mutant of | ETRECIYYNANWELERTQQSGLERCEGDQDKRLHCYASWRNS |
| | SEQ ID NO: 111 | SGSIELVKKGCWLDDFNCYDRQECVATKENPQVYFCCCEGNF |
| | | CNEKFSYFPQMEVTQPTSNPVTPKPP |
| 216 | N18Q mutant of | ETRECIYYNANWELERTQQSGLERCEGDQDKRLHCYASWRNS |
| | SEQ ID NO: 112 | SGTIELVKKGCWLDDFNCYDRQECVATKENPQVYFCCCEGNF |
| | | CNEKFSYFPQMEVTQPTSNPVTPKPP |
| 217 | N18Q mutant of | ETRECIYYNANWELERTQQSGLERCEGEQDKRLHCYASWRNS |
| | SEQ ID NO: 113 | SGTIEIVKKGCWLDDFNCYDRQECVATKENPQVYFCCCEGNFC |
| | | NEKFSYFPQMEVTQPTSNPVTPKPP |
| 218 | N18Q mutant of | ETRECIYYNANWELERTQQSGLERCEGEQDKRLHCYASWRNS |
| | SEQ ID NO: 114 | SGTIELVKKGCWLDDFNCYDRQECVATKENPQVYFCCCEGNF |
| | | CNEKFSYFPQMEVTQPTSNPVTPKPP |
| 219 | N18Q mutant of | ETRECIYYNANWELERTQQSGLERCEGDQDKRLHCYASWRNS |
| | SEQ ID NO: 115 | SGTIEIVKKGCWLDDFNCYDRQECVAKKENPQVYFCCCEGNF |
| | | CNEKFSYFPQMEVTQPTSNPVTPKPP |
| 220 | N18Q mutant of | ETQECLFFNANWEKDRTQQTGVEPCYGDKDKRRHCFATWKNI |
| | SEQ ID NO: 116 | SGSIEIVKQGCWLDDINCYDRTDCVEKKDSPEVYFCCCEGNMC |
| | | NERFTHLPEAGGPEVTYEPPPTAPT |
| 221 | N18Q mutant of | ETRECIYYNANWELERTQQSGLERCYGDKDKRRHCYASWRNS |
| | SEQ ID NO: 117 | SGTIELVKKGCWLDDINCYDRQECVATKENPQVYFCCCEGNF |
| | | CNERFTHLPEAGGPEVTYEPPPTAPT |
| 38 | Human | ASTKGPSVFPLAPSSKSTSGGTAALGCLVKDYFPEPVTVSWNS |
| | immunoglobulin | GALTSGVHTFPAVLQSS |
| | gamma-1 heavy | GLYSLSSVVTVPSSSLGTQTYICNVNHKPSNTKVDKKVEPKSC |
| | chain constant | DKTHTCPPCPAPELLGG |
| | region | PSVFLFPPKPKDTLMISRTPEVTCVVVDVSHEDPEVKFNWYVD |
| | | GVEVHNAKTKPREEQYN |
| | | STYRVVSVLTVLHQDWLNGKEYKCKVSNKALPAPIEKTISKAK |
| | | GQPREPQVYTLPPSRDELTKNQVSLTCLVKGFYPSDIAVEWES |
| | | NGQPENNYKTTPPVLDSDGSFFLYSKLTVDKSRWQQGNVFSCS |
| | | VMHEALHNHYTQKSLSLSPGK |
| 39 | IgG1 Fc Domain | VFLFPPKPKDTLMISRTPEVTCVVVDVSHEDPEVKFNWYVDGV |
| | | EVHNAKTKPREEQYNSTYRVVSVLTVLHQDWLNGKEYKCKV |
| | | SNKALPAPIEKTISKAKGQPREPQVYTLPPSRDELTKNQVSLTC |
| | | LVKGFYPSDIAVEWESNGQPENNYKTTPPVLDSDGSFFLYSKL |
| | | TVDKSRWQQGNVFSCSVMHEALHNHYTQKSLSLSPG |
| 40 | Human | ASTKGPSVFPLAPCSRSTSESTAALGCLVKDYFPEPVTVSWNSG |
| | immunoglobulin | ALTSGVHTFPAVLQSSGLYSLSSVVTVPSSNFGTQTYTCNVDH |
| | gamma-2 heavy | KPSNTKVDKTVERKCCVECPPCPAPPVAGPSVFLFPPKPKDTL |
| | chain constant | MISRTPEVTCVVVDVSHEDPEVQFNWYVDGVEVHNAKTKPRE |
| | region | EQFNSTFRVVSVLTVVHQDWLNGKEYKCKVSNKGLPAPIEKTI |
| | | SKTKGQPREPQVYTLPPSREEMTKNQVSLTCLVKGFYPSDIAV |
| | | EWESNGQPENNYKTTPPMLDSDGSFFLYSKLTVDKSRWQQGN |
| | | VFSCSVMHEALHNHYTQKSLSLSPGK |
| 41 | IgG2 Fc Domain | VFLFPPKPKDTLMISRTPEVTCVVVDVSHEDPEVQFNWYVDGV |
| | | EVHNAKTKPREEQFNSTFRVVSVLTVVHQDWLNGKEYKCKVS |
| | | NKGLPAPIEKTISKTKGQPREPQVYTLPPSREEMTKNQVSLTCL |
| | | VKGFYPSDIAVEWESNGQPENNYKTTPPMLDSDGSFFLYSKLT |
| | | VDKSRWQQGNVFCSVMHEALHNHYTQKSLSLSPG |
| 42 | Human | ASTKGPSVFPLAPCSRSTSESTAALGCLVKDYFPEPVTVSWNSG |
| | immunoglobulin | ALTSGVHTFPAVLQSSGLYSLSSVVTVPSSSLGTKTYTCNVDH |
| | gamma-4 heavy | KPSNTKVDKRVESKYGPPCPSCPAPEFLGGPSVFLFPPKPKDTL |
| | chain constant | MISRTPEVTCVVVDVSQEDPEVQFNWYVDGVEVHNAKTKPRE |
| | region | EQFNSTYRVVSVLTVLHQDWLNGKEYKCKVSNKGLPSSIEKTI |
| | | SKAKGQPREPQVYTLPPSQEEMTKNQVSLTCLVKGFYPSDIAV |
| | | EWESNGQPENNYKTTPPVLDSDGSFFLYSRLTVDKSRWQEGN |
| | | VFSCSVMHEALHNHYTQKSLSLSLGK |
| 43 | IgG4 Fc Domain | APEFLGGPSVFLFPPKPKDTLMISRTPEVTCVVVDVSQEDPEVQ |
| | | FNWYVDGVEVHNAKTKPREEQFNSTYRVVSVLTVLHQDWLN |
| | | GKEYKCKVSNKGLPSSIEKTISKAKGQPREPQVYTLPPSQEEMT |
| | | KNQVSLTCLVKGFYPSDIAVEWESNGQPENNYKTTPPVLDSDG |
| | | SFFLYSRLTVDKSRWQEGNVFSCSVMHEALHNHYTQKSLSLSL |
| | | G |
| 44 | Peptide Linker | GGGGS |
| | sequence | |
| 118 | Hinge linker | ESKYGPPCPPCP |
| 49 | ActRIIB native | MTAPWVALALLWGSLCAG |
| | signal peptide | |
| 50 | Immunoglobulin | MDMRVPAQLLGLLLLWLRGARC |
| | light chain signal | |
| | peptide | |
| 222 | Mutant soluble | ETRECIYYNANWELERTQQSGLERCEGDQDKRLHCYASWRNS |
| | ActRIIB-ECD | SGTIELVKKGCWLDDINCYDRQECVATKENPQVYFCCCEGNF |
| | N18Q fusion | CNERFTHLPEAGGPEVTYEPPPTAPTGGGGSESKYGPPCPPCPA |
| | protein | PEFLGGPSVFLFPPKPKDTLMISRTPEVTCVVVDVSQEDPEVQF |
| | | NWYVDGVEVHNAKTKPREEQFNSTYRVVSVLTVLHQDWLNG |
| | | KEYKCKVSNKGLPSSIEKTISKAKGQPREPQVYTLPPSQEEMTK |
| | | NQVSLTCLVKGFYPSDIAVEWESNGQPENNYKTTPPVLDSDGS |
| | | FFLYSRLTVDKSRWQEGNVFSCSVMHEALHNHYTQKSLSLSL |
| | | G |
| 224 | N18X mutant of | ETRECIYYNANWELERTXQSGLERCYGDKDKRRHCYASWRNS |
| | SEQ ID NO: 3 | SGTIELVKKGCWLDDINCYDRTDCVEKKDSPEVYFCCCEGNFC |
| | | NERFTHLPEAGGPEVTYEPPPTAPT |
| | | Wherein X is any amino acid that is not N |
| 225 | N18X mutant of | ETRECIYYNANWELERTXQSGLERCYGDKDKRRHCYASWRNS |
| | SEQ ID NO: 4 | SGTIELVKKGCWLDDFNCYDRTDCVEKKDSPEVYFCCCEGNF |
| | | CNERFTHLPEAGGPEVTYEPPPTAPT |
| | | Wherein X is any amino acid that is not N |
| 226 | N18X mutant of | ETRECIYYNANWELERTXQSGLERCEGEQDKRLHCYASWRNS |
| | SEQ ID NO: 5 | SGTIELVKKGCWLDDINCYDRTDCVEKKDSPEVYFCCCEGNFC |
| | | NERFTHLPEAGGPEVTYEPPPTAPT |
| | | Wherein X is any amino acid that is not N |
| 227 | N18X mutant of | ETRECIYYNANWELERTXQSGLERCEGEQDKRLHCYASWRNS |
| | SEQ ID NO: 6 | SGTIELVKKGCWLDDINCYDRTDCVEKKDSPQVYFCCCEGNFC |
| | | NERFTHLPEAGGPEVTYEPPPTAPT |
| | | Wherein X is any amino acid that is not N |
| 228 | N18X mutant of | ETRECIYYNANWELERTXQSGLERCEGEQDKRLHCYASWRNS |
| | SEQ ID NO: 7 | SGTIELVKKGCWLDDFNCYDRTDCVEKKDSPQVYFCCCEGNF |
| | | CNERFTHLPEAGGPEVTYEPPPTAPT |
| | | Wherein X is any amino acid that is not N |
| 229 | N18X mutant of | ETRECIYYNANWELERTXQSGLERCEGEQDKRLHCYASWRNS |
| | SEQ ID NO: 8 | SGTIELVKKGCWLDDFNCYDRTDCVEKKDSPEVYFCCCEGNF |
| | | CNERFTHLPEAGGPEVTYEPPPTAPT |
| | | Wherein X is any amino acid that is not N |
| 230 | N18X mutant of | ETRECIYYNANWELERTXQSGLERCEGEQDKRLHCYASWRNS |
| | SEQ ID NO: 9 | SGTIELVKKGCWLDDFNCYDRQECVEKKDSPEVYFCCCEGNF |
| | | CNERFTHLPEAGGPEVTYEPPPTAPT |
| | | Wherein X is any amino acid that is not N |
| 231 | N18X mutant of | ETRECIYYNANWELERTXQSGLERCEGEQDKRLHCYASWRNS |
| | SEQ ID NO: 10 | SGTIELVKKGCWLDDFNCYDRQECVEKKDSPQVYFCCCEGNF |
| | | CNERFTHLPEAGGPEVTYEPPPTAPT |
| | | Wherein X is any amino acid that is not N |
| 232 | N18X mutant of | TRECIYYNANWELERTXQSGLERCEGEQDKRLHCYASWRNSS |
| | SEQ ID NO: 11 | GTIELVKKGCWLDDINCYDRQECVEKKDSPEVYFCCCEGNFC |
| | | NERFTHLPEAGGPEVTYEPPPTAPT |
| | | Wherein X is any amino acid that is not N |
| 233 | N18X mutant of | ETRECIYYNANWELERTXQSGLERCEGEQDKRLHCYASWRNS |
| | SEQ ID NO: 12 | SGTIELVKKGCWLDDFNCYDRTDCVEKKDSPEVYFCCCEGNM |
| | | CNERFTHLPEAGGPEVTYEPPPTAPT |
| | | Wherein X is any amino acid that is not N |
| 234 | N18X mutant of | ETRECIYYNANWELERTXQSGLERCEGDQDKRLHCYASWRNS |
| | SEQ ID NO: 13 | SGTIELVKKGCWLDDFNCYDRQECVEKKDSPEVYFCCCEGNM |
| | | CNERFTHLPEAGGPEVTYEPPPTAPT |
| | | Wherein X is any amino acid that is not N |
| 235 | N18X mutant of | ETQECIYYNANWEKDRTXQTGVEPCYGDKDKRRHCYASWRN |
| | SEQ ID NO: 14 | SSGTIELVKKGCWLDDENCYDRQECVATEENPQVYFCCCEGN |
| | | FCNERFTHLPEAGGPEVTYEPPPTAPT |
| | | Wherein X is any amino acid that is not N |
| 236 | N18X mutant of | ETQECIYYNANWEKDRTXQTGVEPCEGDQDKRLHCYASWRN |
| | SEQ ID NO: 15 | SSGTIELVKKGCWLDDFNCYDRQECVATEENPQVYFCCCEGN |
| | | FCNERFTHLPEAGGPEVTYEPPPTAPT |
| | | Wherein X is any amino acid that is not N |
| 237 | N18X mutant of | ETRECIYYNANWELERTXQSGLERCYGDKDKRRHCYASWRNS |
| | SEQ ID NO: 16 | SGTIELVKKGCWLDDFNCYDRQECVATEENPQVYFCCCEGNF |
| | | CNERFTHLPEAGGPEVTYEPPPTAPT |
| | | Wherein X is any amino acid that is not N |
| 238 | N18X mutant of | ETRECIYYNANWEKDRTXQTGVEPCEGDQDKRLHCYASWRN |
| | SEQ ID NO: 17 | SSGTIELVKKGCWLDDFNCYDRQECVATEENPQVYFCCCEGN |
| | | FCNERFTHLPEAGGPEVTYEPPPTAPT |
| | | Wherein X is any amino acid that is not N |
| 239 | N18X mutant of | ETQECIYYNANWEKDRTXQTGVEPCEGDQDKRLHCYASWRN |
| | SEQ ID NO: 18 | SSGTIELVKKGCWLDDFNCYDRQECVATEENPQVYFCCCEGN |
| | | FCNERFTHLPEAGGPEVTYEPPPTAPT |
| | | Wherein X is any amino acid that is not N |
| 240 | N18X mutant of | ETQECIYYNANWEKDRTXQTGLERCEGEQDKRLHCYASWRNS |
| | SEQ ID NO: | SGTIELVKKGCWLDDFNCYDRQECVATEENPQVYFCCCEGNF |
| | | CNERFTHLPEAGGPEVTYEPPPTAPT |
| | | Wherein X is any amino acid that is not N |
| 241 | N18X mutant of | ETQECIYYNANWEKDRTXQSGLERCEGEQDKRLHCYASWRNS |
| | SEQ ID NO: 20 | SGTIELVKKGCWLDDFNCYDRQECVATEENPQVYFCCCEGNF |
| | | CNERFTHLPEAGGPEVTYEPPPTAPT |
| | | Wherein X is any amino acid that is not N |
| 242 | N18X mutant of | ETRECIYYNANWEKDRTXQSGLERCEGEQDKRLHCYASWRNS |
| | SEQ ID NO: 21 | SGTIELVKKGCWLDDFNCYDRQECVATEENPQVYFCCCEGNF |
| | | CNERFTHLPEAGGPEVTYEPPPTAPT |
| | | Wherein X is any amino acid that is not N |
| 243 | N18X mutant of | ETQECIYYNANWELERTXQSGLERCEGEQDKRLHCYASWRNS |
| | SEQ ID NO: 22 | SGTIELVKKGCWLDDFNCYDRQECVATEENPQVYFCCCEGNF |
| | | CNERFTHLPEAGGPEVTYEPPPTAPT |
| | | Wherein X is any amino acid that is not N |
| 244 | N18X mutant of | ETRECIYYNANWELERTXQSGLERCEGEQDKRLHCFATWRNS |
| | SEQ ID NO: 23 | SGTIELVKQGCWLDDFNCYDRQECVATEENPQVYFCCCEGNF |
| | | CNERFTHLPEAGGPEVTYEPPPTAPT |
| | | Wherein X is any amino acid that is not N |
| 245 | N18X mutant of | ETRECIYYNANWELERTXQSGLERCYGDKDKRRHCYASWRNS |
| | SEQ ID NO: 24 | SGTIELVKKGCWLDDINCYDRQECVATEENPQVYFCCCEGNFC |
| | | NERFTHLPEAGGPEVTYEPPPTAPT |
| | | Wherein X is any amino acid that is not N |
| 246 | N18X mutant of | ETRECIYYNANWELERTXQSGLERCEGEQDKRLHCYASWRNS |
| | SEQ ID NO: 25 | SGTIELVKKGCWLDDFNCYDRQECVATKENPQVYFCCCEGNF |
| | | CNERFTHLPEAGGPEVTYEPPPTAPT |
| | | Wherein X is any amino acid that is not N |
| 247 | N18X mutant of | ETRECIYYNANWELERTXQSGLERCEGEQDKRLHCYASWRNS |
| | SEQ ID NO: 26 | SGTIELVKKGCWLDDINCYDRQECVATEENPQVYFCCCEGNFC |
| | | NERFTHLPEAGGPEVTYEPPPTAPT |
| | | Wherein X is any amino acid that is not N |
| 248 | N18X mutant of | ETRECIYYNANWELERTXQSGLERCEGEQDKRLHCYASWRNS |
| | SEQ ID NO: 27 | SGTIELVKKGCWLDDINCYDRQECVATKENPQVYFCCCEGNF |
| | | CNERFTHLPEAGGPEVTYEPPPTAPT |
| | | Wherein X is any amino acid that is not N |
| 249 | N18X mutant of | ETRECIYYNANWELERTXQSGLERCEGDKDKRLHCYASWRNS |
| | SEQ ID NO: 28 | SGTIELVKKGCWLDDINCYDRQECVATKENPQVYFCCCEGNF |
| | | CNERFTHLPEAGGPEVTYEPPPTAPT |
| | | Wherein X is any amino acid that is not N |
| 250 | N18X mutant of | ETRECIYYNANWELERTXQSGLERCEGDQDKRLHCYASWRNS |
| | SEQ ID NO: 29 | SGTIELVKKGCWLDDINCYDRQECVATKENPQVYFCCCEGNF |
| | | CNERFTHLPEAGGPEVTYEPPPTAPT |
| | | Wherein X is any amino acid that is not N |
| 251 | N18X mutant of | ETRECIYYNANWELERTXQSGLERCEGDQDKRLHCYASWRNS |
| | SEQ ID NO: 30 | SGTIELVKKGCWLDDFNCYDRQECVATKENPQVYFCCCEGNF |
| | | CNERFTHLPEAGGPEVTYEPPPTAPT |
| | | Wherein X is any amino acid that is not N |
| 252 | N18X mutant of | ETRECIYYNANWELERTXQSGLERCEGDQDKRLHCYASWRNS |
| | SEQ ID NO: 31 | SGTIELVKKGCWLDDFNCYDRQECVATEENPQVYFCCCEGNF |
| | | CNERFTHLPEAGGPEVTYEPPPTAPT |
| | | Wherein X is any amino acid that is not N |
| 253 | N18X mutant of | ETRECIYYNANWELERTXQSGLERCYGDKDKRRHCYASWRNS |
| | SEQ ID NO: 32 | SGTIELVKKGCWLDDINCYDRQECVEKKDSPEVYFCCCEGNFC |
| | | NERFTHLPEAGGPEVTYEPPPTAPT |
| | | Wherein X is any amino acid that is not N |
| 254 | N18X mutant of | ETRECIFFNANWEKDRTXQTGVEPCEGEQDKRLHCYASWRNS |
| | SEQ ID NO: 33 | SGTIELVKKGCWLDDFNCYDRQECVATEENPQVYFCCCEGNF |
| | | CNERFTHLPEAGGPEVTYEPPPTAPT |
| | | Wherein X is any amino acid that is not N |
| 255 | N18X mutant of | ETRECIYYNANWELERTXQSGLERCEGEQDKRLHCFATWKNIS |
| | SEQ ID NO: 34 | GSIELVKQGCWLDDFNCYDRQECVATEENPQVYFCCCEGNFC |
| | | NERFTHLPEAGGPEVTYEPPPTAPT |
| | | Wherein X is any amino acid that is not N |
| 256 | N18X mutant of | ETRECIYYNANWELERTXQSGLERCEGEQDKRLHCYASWRNS |
| | SEQ ID NO: 35 | SGTIELVKKGCWLDDFNCYDRTDCVATEENPQVYFCCCEGNF |
| | | CNERFTHLPEAGGPEVTYEPPPTAPT |
| | | Wherein X is any amino acid that is not N |
| 257 | N18X mutant of | ETRECIYYNANWELERTXQSGLERCEGEQDKRLHCYASWRNS |
| | SEQ ID NO: 36 | SGTIELVKKGCWLDDFNCYDRQECVATEENPQVYFCCCEGNM |
| | | CNERFTHLPEAGGPEVTYEPPPTAPT |
| | | Wherein X is any amino acid that is not N |
| 258 | N18X mutant of | ETRECIYYNANWELERTXQSGLERCEGDQDKRLHCYASWRNS |
| | SEQ ID NO: 37 | SGTIELVKKGCWLDDINCYDRQECVATEENPQVYFCCCEGNFC |
| | | NERFTHLPEAGGPEVTYEPPPTAPT |
| | | Wherein X is any amino acid that is not N |
| 259 | N18X mutant of | ETQECLFFNANWEKDRTXQSGVEPCYGDKDKRRHCYASWRN |
| | SEQ ID NO: 51 | SSGTIELVKKGCWLDDFNCYDRQECVATEENPQVYFCCCEGN |
| | | FCNERFTHLPEAGGPEVTYEPPPTAPT |
| | | Wherein X is any amino acid that is not N |
| 260 | N18X mutant of | ETQECLFFNANWEKDRTXQSGVEPCEGEQDKRLHCYASWRNS |
| | SEQ ID NO: 52 | SGTIELVKKGCWLDDFNCYDRQECVATEENPQVYFCCCEGNF |
| | | CNERFTHLPEAGGPEVTYEPPPTAPT |
| | | Wherein X is any amino acid that is not N |
| 261 | N18X mutant of | ETRECLFFNANWEKDRTXQSGVEPCEGEQDKRLHCYASWRNS |
| | SEQ ID NO: 53 | SGTIELVKKGCWLDDFNCYDRQECVATEENPQVYFCCCEGNF |
| | | CNERFTHLPEAGGPEVTYEPPPTAPT |
| | | Wherein X is any amino acid that is not N |
| 262 | N18X mutant of | ETQECLFFNANWEKDRTXQSGVEPCYGEQDKRLHCYASWRNS |
| | SEQ ID NO: 54 | SGTIELVKKGCWLDDFNCYDRQECVATEENPQVYFCCCEGNF |
| | | CNERFTHLPEAGGPEVTYEPPPTAPT |
| | | Wherein X is any amino acid that is not N |
| 263 | N18X mutant of | ETRECLFFNANWEKDRTXQSGVEPCYGDKDKRRHCYASWRN |
| | SEQ ID NO: 55 | SSGTIELVKKGCWLDDFNCYDRQECVATEENPQVYFCCCEGN |
| | | FCNERFTHLPEAGGPEVTYEPPPTAPT |
| | | Wherein X is any amino acid that is not N |
| 264 | N18X mutant of | ETRECLFFNANWEKDRTXQTGVEPCYGDKDKRRHCFATWKNI |
| | SEQ ID NO: 56 | SGSIEIVKQGCWLDDFNCYDRQECVATEENPQVYFCCCEGNFC |
| | | NERFTHLPEAGGPEVTYEPPPTAPT |
| | | Wherein X is any amino acid that is not N |
| 265 | N18X mutant of | ETRECLFFNANWEKDRTXQTGVEPCYGDKDKRRHCFATWKNI |
| | SEQ ID NO: 57 | SGSIEIVKQGCWLDDINCYDRQECVATEENPQVYFCCCEGNFC |
| | | NERFTHLPEAGGPEVTYEPPPTAPT |
| | | Wherein X is any amino acid that is not N |
| 266 | N18X mutant of | ETRECLFFNANWEKDRTXQTGVEPCYGDKDKRRHCFATWKNI |
| | SEQ ID NO: 58 | SGSIEIVKQGCWLDDINCYDRTDCVEKKDSPEVYFCCCEGNFC |
| | | NERFTHLPEAGGPEVTYEPPPTAPT |
| | | Wherein X is any amino acid that is not N |
| 267 | N18X mutant of | ETQECIYYNANWELERTXQSGLERCYGDKDKRRHCFATWKNI |
| | SEQ ID NO: 59 | SGSIEIVKQGCWLDDINCYDRQECVATEENPQVYFCCCEGNFC |
| | | NERFTHLPEAGGPEVTYEPPPTAPT |
| | | Wherein X is any amino acid that is not N |
| 268 | N18X mutant of | ETRECIYYNANWELERTXQSGLERCYGDKDKRRHCFATWKNI |
| | SEQ ID NO: 60 | SGSIEIVKQGCWLDDINCYDRTDCVEKKDSPEVYFCCCEGNFC |
| | | NERFTHLPEAGGPEVTYEPPPTAPT |
| | | Wherein X is any amino acid that is not N |
| 269 | N18X mutant of | ETRECIYYNANWELERTXQSGLERCYGDKDKRRHCFATWKNI |
| | SEQ ID NO: 61 | SGSIEIVKQGCWLDDINCYDRTDCVEKKDSPEVYFCCCEGNMC |
| | | NERFTHLPEAGGPEVTYEPPPTAPT |
| | | Wherein X is any amino acid that is not N |
| 270 | N18X mutant of | ETRECIYYNANWELERTXQSGLERCEGEQDKRLHCFATWKNIS |
| | SEQ ID NO: 62 | GSIEIVKQGCWLDDINCYDRTDCVEKKDSPEVYFCCCEGNFCN |
| | | ERFTHLPEAGGPEVTYEPPPTAPT |
| | | Wherein X is any amino acid that is not N |
| 271 | N18X mutant of | ETRECIYYNANWELERTXQSGLERCEGEQDKRLHCFATWKNIS |
| | SEQ ID NO: 63 | GSIEIVKQGCWLDDINCYDRTDCVATEENPQVYFCCCEGNFCN |
| | | ERFTHLPEAGGPEVTYEPPPTAPT |
| | | Wherein X is any amino acid that is not N |
| 272 | N18X mutant of | ETRECIYYNANWELERTXQSGLERCEGEQDKRLHCFATWKNIS |
| | SEQ ID NO: 64 | GSIEIVKQGCWLDDFNCYDRTDCVATEENPQVYFCCCEGNFCN |
| | | ERFTHLPEAGGPEVTYEPPPTAPT |
| | | Wherein X is any amino acid that is not N |
| 273 | N18X mutant of | ETRECIYYNANWELERTXQSGLERCEGEQDKRLHCFATWKNIS |
| | SEQ ID NO: 65 | GSIEIVKQGCWLDDFNCYDRQECVATEENPQVYFCCCEGNFCN |
| | | ERFTHLPEAGGPEVTYEPPPTAPT |
| | | Wherein X is any amino acid that is not N |
| 274 | N18X mutant of | ETQECIYYNANWELERTXQSGLERCYGDKDKRRHCYASWRNS |
| | SEQ ID NO: 66 | SGTIELVKKGCWLDDINCYDRTDCVEKKDSPEVYFCCCEGNFC |
| | | NERFTHLPEAGGPEVTYEPPPTAPT |
| | | Wherein X is any amino acid that is not N |
| 275 | N18X mutant of | ETQECIYYNANWELERTXQSGLERCYGDKDKRRHCYASWRNS |
| | SEQ ID NO: 67 | SGTIELVKKGCWLDDINCYDRTDCVEKKDSPEVYFCCCEGNM |
| | | CNERFTHLPEAGGPEVTYEPPPTAPT |
| | | Wherein X is any amino acid that is not N |
| 276 | N18X mutant of | ETQECIYYNANWELERTXQSGLERCYGDKDKRRHCFATWKNI |
| | SEQ ID NO: 68 | SGSIEIVKQGCWLDDINCYDRTDCVEKKDSPEVYFCCCEGNMC |
| | | NERFTHLPEAGGPEVTYEPPPTAPT |
| | | Wherein X is any amino acid that is not N |
| 277 | N18X mutant of | ETQECIYYNANWELERTXQSGLERCYGDKDKRRHCFATWKNI |
| | SEQ ID NO: 69 | SGSIEIVKQGCWLDDINCYDRTDCVEKKDSPEVYFCCCEGNFC |
| | | NERFTHLPEAGGPEVTYEPPPTAPT |
| | | Wherein X is any amino acid that is not N |
| 278 | N18X mutant of | ETRECLFFNANWEKDRTXQTGVEPCEGEQDKRLHCFATWKNI |
| | SEQ ID NO: 70 | SGSIEIVKQGCWLDDINCYDRTDCVEKKDSPEVYFCCCEGNFC |
| | | NERFTHLPEAGGPEVTYEPPPTAPT |
| | | Wherein X is any amino acid that is not N |
| 279 | N18X mutant of | ETRECLFFNANWEKDRTXQSGVEPCEGEQDKRLHCYASWRNS |
| | SEQ ID NO: 71 | SGTIELVKKGCWLDDINCYDRTDCVEKKDSPEVYFCCCEGNFC |
| | | NERFTHLPEAGGPEVTYEPPPTAPT |
| | | Wherein X is any amino acid that is not N |
| 280 | N18X mutant of | ETRECLFFNANWEKDRTXQSGVEPCYGDKDKRRHCYASWRN |
| | SEQ ID NO: 72 | SSGTIELVKKGCWLDDINCYDRTDCVEKKDSPEVYFCCCEGNF |
| | | CNERFTHLPEAGGPEVTYEPPPTAPT |
| | | Wherein X is any amino acid that is not N |
| 281 | N18X mutant of | ETRECIYYNANWELERTXQSGLERCYGDKDKRRHCYASWRNS |
| | SEQ ID NO: 73 | SGTIELVKKGCWLDDFNCYDRTDCVATEENPQVYFCCCEGNF |
| | | CNERFTHLPEAGGPEVTYEPPPTAPT |
| | | Wherein X is any amino acid that is not N |
| 282 | N18X mutant of | ETRECIYYNANWELERTXQSGLERCYGDKDKRRHCYASWRNS |
| | SEQ ID NO: 74 | SGTIELVKQGCWLDDFNCYDRTDCVATEENPQVYFCCCEGNF |
| | | CNERFTHLPEAGGPEVTYEPPPTAPT |
| | | Wherein X is any amino acid that is not N |
| 283 | N18X mutant of | ETRECIYYNANWELERTXQSGLERCYGDKDKRRHCYASWRNS |
| | SEQ ID NO: 75 | SGTIEIVKKGCWLDDFNCYDRTDCVATEENPQVYFCCCEGNFC |
| | | NERFTHLPEAGGPEVTYEPPPTAPT |
| | | Wherein X is any amino acid that is not N |
| 284 | N18X mutant of | ETRECIYYNANWELERTXQSGLERCYGDKDKRRHCYASWRNS |
| | SEQ ID NO: 76 | SGSIELVKKGCWLDDFNCYDRTDCVATEENPQVYFCCCEGNF |
| | | CNERFTHLPEAGGPEVTYEPPPTAPT |
| | | Wherein X is any amino acid that is not N |
| 285 | N18X mutant of | ETRECIYYNANWELERTXQSGLERCYGDKDKRRHCYASWRNS |
| | SEQ ID NO: 77 | SGSIEIVKKGCWLDDFNCYDRTDCVATEENPQVYFCCCEGNFC |
| | | NERFTHLPEAGGPEVTYEPPPTAPT |
| | | Wherein X is any amino acid that is not N |
| 286 | N18X mutant of | ETRECIYYNANWELERTXQSGLERCYGDKDKRRHCYASWRNS |
| | SEQ ID NO: 78 | SGSIEIVKQGCWLDDFNCYDRTDCVATEENPQVYFCCCEGNFC |
| | | NERFTHLPEAGGPEVTYEPPPTAPT |
| | | Wherein X is any amino acid that is not N |
| 287 | N18X mutant of | ETRECIYYNANWELERTXQSGLERCEGEQDKRLHCYASWRNS |
| | SEQ ID NO: 79 | SGTIELVKKGCWLDDFNCYDRTDCVATEENPQVYFCCCEGNF |
| | | CNERFTHLPEAGGPEVTYEPPPTAPT |
| | | Wherein X is any amino acid that is not N |
| 288 | N18X mutant of | ETRECIYYNANWELERTXQSGLERCEGEQDKRLHCYASWRNS |
| | SEQ ID NO: 80 | SGTIELVKKGCWLDDFNCYDRQECVATEENPQVYFCCCEGNF |
| | | CNEKFSYFPEMEVTQPTSNPVTPKPP |
| | | Wherein X is any amino acid that is not N |
| 289 | N18X mutant of | ETRECIYYNANWELERTXQSGLERCEGEQDKRLHCYASWRNS |
| | SEQ ID NO: 81 | SGTIELVKKGCWLDDFNCYDRQECVATEENPQVYFCCCEGNF |
| | | CNEKFSYFPQMEVTQPTSNPVTPKPP |
| | | Wherein X is any amino acid that is not N |
| 290 | N18X mutant of | ETRECIYYNANWELERTXQSGLERCYGDKDKRRHCYASWRNS |
| | SEQ ID NO: 82 | SGTIELVKKGCWLDDINCYDRTDCVEKKDSPEVYFCCCEGNFC |
| | | NEKFSYFPEMEVTQPTSNPVTPKPP |
| | | Wherein X is any amino acid that is not N |
| 291 | N18X mutant of | ETRECIYYNANWELERTXQSGLERCYGDKDKRRHCYASWRNS |
| | SEQ ID NO: 83 | SGTIELVKKGCWLDDINCYDRTDCVEKKDSPEVYFCCCEGNFC |
| | | NEKFSYFPQMEVTQPTSNPVTPKPP |
| | | Wherein X is any amino acid that is not N |
| 292 | N18X mutant of | ETRECIYYNANWELERTXQSGLERCYGDKDKRRHCYASWRNS |
| | SEQ ID NO: 84 | SGTIELVKKGCWLDDFNCYDRQECVATEENPQVYFCCCEGNF |
| | | CNEKFSYFPQMEVTQPTSNPVTPKPP |
| | | Wherein X is any amino acid that is not N |
| 293 | N18X mutant of | ETRECIYYNANWELERTXQSGLERCYGDKDKRRHCYASWRNS |
| | SEQ ID NO: 85 | SGTIELVKQGCWLDDFNCYDRQECVATEENPQVYFCCCEGNF |
| | | CNEKFSYFPQMEVTQPTSNPVTPKPP |
| | | Wherein X is any amino acid that is not N |
| 294 | N18X mutant of | ETRECIYYNANWELERTXQSGLERCYGDKDKRRHCYASWRNS |
| | SEQ ID NO: 86 | SGTIEIVKKGCWLDDFNCYDRQECVATKENPQVYFCCCEGNFC |
| | | NEKFSYFPQMEVTQPTSNPVTPKPP |
| | | Wherein X is any amino acid that is not N |
| 295 | N18X mutant of | ETRECIYYNANWELERTXQSGLERCYGDKDKRRHCYASWRNS |
| | SEQ ID NO: 87 | SGSIELVKKGCWLDDFNCYDRQECVATKENPQVYFCCCEGNF |
| | | CNEKFSYFPQMEVTQPTSNPVTPKPP |
| | | Wherein X is any amino acid that is not N |
| 296 | N18X mutant of | ETRECIYYNANWELERTXQSGLERCEGEQDKRLHCYASWRNS |
| | SEQ ID NO: 88 | SGSIELVKKGCWLDDFNCYDRQECVATEENPQVYFCCCEGNF |
| | | CNEKFSYFPQMEVTQPTSNPVTPKPP |
| | | Wherein X is any amino acid that is not N |
| 297 | N18X mutant of | ETRECIYYNANWELERTXQSGLERCEGEQDKRLHCYASWRNS |
| | SEQ ID NO: 89 | SGTIEIVKKGCWLDDFNCYDRQECVATEENPQVYFCCCEGNFC |
| | | NEKFSYFPQMEVTQPTSNPVTPKPP |
| | | Wherein X is any amino acid that is not N |
| 298 | N18X mutant of | ETRECIYYNANWELERTXQSGLERCEGEQDKRLHCYASWRNS |
| | SEQ ID NO: 90 | SGTIELVKQGCWLDDFNCYDRQECVATEENPQVYFCCCEGNF |
| | | CNEKFSYFPQMEVTQPTSNPVTPKPP |
| | | Wherein X is any amino acid that is not N |
| 299 | N18X mutant of | ETRECIYYNANWELERTXQSGLERCEGEQDKRLHCYASWRNS |
| | SEQ ID NO: 91 | SGTIELVKKGCWLDDFNCYDRQECVETEENPQVYFCCCEGNF |
| | | CNEKFSYFPQMEVTQPTSNPVTPKPP |
| | | Wherein X is any amino acid that is not N |
| 300 | N18X mutant of | ETRECIYYNANWELERTXQSGLERCEGEQDKRLHCYASWRNS |
| | SEQ ID NO: 92 | SGTIELVKKGCWLDDFNCYDRQECVAKEENPQVYFCCCEGNF |
| | | CNEKFSYFPQMEVTQPTSNPVTPKPP |
| | | Wherein X is any amino acid that is not N |
| 301 | N18X mutant of | ETRECIYYNANWELERTXQSGLERCEGEQDKRLHCYASWRNS |
| | SEQ ID NO: 93 | SGTIELVKKGCWLDDFNCYDRQECVATKENPQVYFCCCEGNF |
| | | CNEKFSYFPQMEVTQPTSNPVTPKPP |
| | | Wherein X is any amino acid that is not N |
| 302 | N18X mutant of | ETRECIYYNANWELERTXQSGLERCEGEQDKRLHCYASWRNS |
| | SEQ ID NO: 94 | SGTIELVKKGCWLDDFNCYDRQECVATEDNPQVYFCCCEGNF |
| | | CNEKFSYFPQMEVTQPTSNPVTPKPP |
| | | Wherein X is any amino acid that is not N |
| 303 | N18X mutant of | ETRECIYYNANWELERTXQSGLERCEGEQDKRLHCYASWRNS |
| | SEQ ID NO: 95 | SGTIELVKKGCWLDDFNCYDRQECVATEESPQVYFCCCEGNFC |
| | | NEKFSYFPQMEVTQPTSNPVTPKPP |
| | | Wherein X is any amino acid that is not N |
| 304 | N18X mutant of | ETRECIYYNANWELERTXQSGLERCEGEQDKRLHCYASWRNS |
| | SEQ ID NO: 96 | SGTIELVKKGCWLDDFNCYDRQECVATEENPEVYFCCCEGNF |
| | | CNEKFSYFPQMEVTQPTSNPVTPKPP |
| | | Wherein X is any amino acid that is not N |
| 305 | N18X mutant of | ETRECIYYNANWELERTXQSGLERCEGDKDKRLHCYASWRNS |
| | SEQ ID NO: 97 | SGTIELVKKGCWLDDFNCYDRQECVETEENPQVYFCCCEGNF |
| | | CNEKFSYFPQMEVTQPTSNPVTPKPP |
| | | Wherein X is any amino acid that is not N |
| 306 | N18X mutant of | ETRECIYYNANWELERTXQSGLERCEGEKDKRLHCYASWRNS |
| | SEQ ID NO: 98 | SGTIELVKKGCWLDDFNCYDRQECVAKEENPQVYFCCCEGNF |
| | | CNEKFSYFPQMEVTQPTSNPVTPKPP |
| | | Wherein X is any amino acid that is not N |
| 307 | N18X mutant of | ETRECIYYNANWELERTXQSGLERCEGDQDKRLHCYASWRNS |
| | SEQ ID NO: 99 | SGTIELVKKGCWLDDFNCYDRQECVATKENPQVYFCCCEGNF |
| | | CNEKFSYFPQMEVTQPTSNPVTPKPP |
| | | Wherein X is any amino acid that is not N |
| 308 | N18X mutant of | ETRECIYYNANWELERTXQSGLERCEGDKDKRLHCYASWRNS |
| | SEQ ID NO: 100 | SGTIELVKQGCWLDDFNCYDRQECVAKKENPQVYFCCCEGNF |
| | | CNEKFSYFPQMEVTQPTSNPVTPKPP |
| | | Wherein X is any amino acid that is not N |
| 309 | N18X mutant of | ETRECIYYNANWELERTXQSGLERCEGDKDKRLHCYASWRNS |
| | | SGTIEIVKQGCWLDDFNCYDRQECVAEKENPQVYFCCCEGNFC |
| | | NEKFSYFPQMEVTQPTSNPVTPKPP |
| | SEQ ID NO: 101 | Wherein X is any amino acid that is not N |
| 310 | N18X mutant of | ETRECIYYNANWELERTXQSGLERCYGDQDKRLHCYASWRNS |
| | SEQ ID NO: 102 | SGSIEIVKQGCWLDDFNCYDRQECVAKKENPQVYFCCCEGNF |
| | | CNEKFSYFPQMEVTQPTSNPVTPKPP |
| | | Wherein X is any amino acid that is not N |
| 311 | N18X mutant of | ETRECIYYNANWELERTXQSGLERCEGEKDKRRHCYASWRNS |
| | SEQ ID NO: 103 | SGTIEIVKKGCWLDDFNCYDRQECVATKENPQVYFCCCEGNFC |
| | | NEKFSYFPQMEVTQPTSNPVTPKPP |
| | | Wherein X is any amino acid that is not N |
| 312 | N18X mutant of | ETRECIYYNANWELERTXQSGLERCYGDQDKRRHCYASWRNS |
| | SEQ ID NO: 104 | SGTIELVKKGCWLDDFNCYDRQECVATEENPEVYFCCCEGNF |
| | | CNEKFSYFPQMEVTQPTSNPVTPKPP |
| | | Wherein X is any amino acid that is not N |
| 313 | N18X mutant of | ETRECIYYNANWELERTXQSGLERCEGEQDKRRHCYASWRNS |
| | SEQ ID NO: 105 | SGTIELVKKGCWLDDFNCYDRQECVATEENPQVYFCCCEGNF |
| | | CNEKFSYFPQMEVTQPTSNPVTPKPP |
| | | Wherein X is any amino acid that is not N |
| 314 | N18X mutant of | ETRECIYYNANWELERTXQSGLERCYGEQDKRLHCYASWRNS |
| | SEQ ID NO: 106 | SGSIEIVKKGCWLDDFNCYDRTDCVATEENPQVYFCCCEGNFC |
| | | NEKFSYFPQMEVTQPTSNPVTPKPP |
| | | Wherein X is any amino acid that is not N |
| 315 | N18X mutant of | ETRECIYYNANWELERTXQSGLERCEGEQDKRRHCYASWRNS |
| | SEQ ID NO: 107 | SGSIELVKKGCWLDDFNCYDRQECVAKEENPQVYFCCCEGNF |
| | | CNEKFSYFPQMEVTQPTSNPVTPKPP |
| | | Wherein X is any amino acid that is not N |
| 316 | N18X mutant of | ETRECIYYNANWELERTXQSGLERCEGEQDKRRHCYASWRNS |
| | SEQ ID NO: 108 | SGTIEIVKKGCWLDDFNCYDRQECVAKEENPQVYFCCCEGNFC |
| | | NEKFSYFPQMEVTQPTSNPVTPKPP |
| | | Wherein X is any amino acid that is not N |
| 317 | N18X mutant of | ETRECIYYNANWELERTXQSGLERCEGEQDKRRHCYASWRNS |
| | SEQ ID NO: 109 | SGSIEIVKKGCWLDDFNCYDRQECVATKENPQVYFCCCEGNFC |
| | | NEKFSYFPQMEVTQPTSNPVTPKPP |
| | | Wherein X is any amino acid that is not N |
| 318 | N18X mutant of | ETRECIYYNANWELERTXQSGLERCEGDQDKRLHCYASWRNS |
| | SEQ ID NO: 110 | SGTIEIVKKGCWLDDFNCYDRQECVATKENPQVYFCCCEGNFC |
| | | NEKFSYFPQMEVTQPTSNPVTPKPP |
| | | Wherein X is any amino acid that is not N |
| 319 | N18X mutant of | ETRECIYYNANWELERTXQSGLERCEGDQDKRLHCYASWRNS |
| | SEQ ID NO: 111 | SGSIELVKKGCWLDDFNCYDRQECVATKENPQVYFCCCEGNF |
| | | CNEKFSYFPQMEVTQPTSNPVTPKPP |
| | | Wherein X is any amino acid that is not N |
| 320 | N18X mutant of | ETRECIYYNANWELERTXQSGLERCEGDQDKRLHCYASWRNS |
| | SEQ ID NO: 112 | SGTIELVKKGCWLDDFNCYDRQECVATKENPQVYFCCCEGNF |
| | | CNEKFSYFPQMEVTQPTSNPVTPKPP |
| | | Wherein X is any amino acid that is not N |
| 321 | N18X mutant of | ETRECIYYNANWELERTXQSGLERCEGEQDKRLHCYASWRNS |
| | SEQ ID NO: 113 | SGTIEIVKKGCWLDDFNCYDRQECVATKENPQVYFCCCEGNFC |
| | | NEKFSYFPQMEVTQPTSNPVTPKPP |
| | | Wherein X is any amino acid that is not N |
| 322 | N18X mutant of | ETRECIYYNANWELERTXQSGLERCEGEQDKRLHCYASWRNS |
| | SEQ ID NO: 114 | SGTIELVKKGCWLDDFNCYDRQECVATKENPQVYFCCCEGNF |
| | | CNEKFSYFPQMEVTQPTSNPVTPKPP |
| | | Wherein X is any amino acid that is not N |
| 323 | N18X mutant of | ETRECIYYNANWELERTXQSGLERCEGDQDKRLHCYASWRNS |
| | SEQ ID NO: 115 | SGTIEIVKKGCWLDDFNCYDRQECVAKKENPQVYFCCCEGNF |
| | | CNEKFSYFPQMEVTQPTSNPVTPKPP |
| | | Wherein X is any amino acid that is not N |
| 324 | N18X mutant of | ETQECLFFNANWEKDRTXQTGVEPCYGDKDKRRHCFATWKNI |
| | SEQ ID NO: 116 | SGSIEIVKQGCWLDDINCYDRTDCVEKKDSPEVYFCCCEGNMC |
| | | NERFTHLPEAGGPEVTYEPPPTAPT |
| | | Wherein X is any amino acid that is not N |
| 325 | N18X mutant of | ETRECIYYNANWELERTXQSGLERCYGDKDKRRHCYASWRNS |
| | SEQ ID NO: 117 | SGTIELVKKGCWLDDINCYDRQECVATKENPQVYFCCCEGNF |
| | | CNERFTHLPEAGGPEVTYEPPPTAPT |
| | | Wherein X is any amino acid that is not N |
| 326 | S20X mutant of | ETRECIYYNANWELERTNQXGLERCEGEQDKRLHCYASWRNS |
| | SEQ ID NO: 1 | SGTIELVKKGCWLDDFNCYDRQECVATEENPQVYFCCCEGNF |
| | | CNERFTHLPEAGGPEVTYEPPPTAPT |
| | | Wherein X is any amino acid that is not S or T |
| 327 | L55D mutant of | ETRECIYYNANWELERTNQSGLERCEGEQDKRLHCYASWRNS |
| | SEQ ID NO: 1 | SGTIELVKKGCWDDDFNCYDRQECVATEENPQVYFCCCEGNF |
| | | CNERFTHLPEAGGPEVTYEPPPTAPT |
| 328 | N18X and L55D | ETRECIYYNANWELERTXQSGLERCEGEQDKRLHCYASWRNS |
| | mutant of SEQ ID | SGTIELVKKGCWDDDFNCYDRQECVATEENPQVYFCCCEGNF |
| | NO: 1 | CNERFTHLPEAGGPEVTYEPPPTAPT |
| | | Wherein X is any amino acid that is not N |
| 329 | N18Q and L55D | ETRECIYYNANWELERTQQSGLERCEGEQDKRLHCYASWRNS |
| | mutant of SEQ ID | SGTIELVKKGCWDDDFNCYDRQECVATEENPQVYFCCCEGNF |
| | NO: 1 | CNERFTHLPEAGGPEVTYEPPPTAPT |
| 330 | L55E mutant of | ETRECIYYNANWELERTNQSGLERCEGEQDKRLHCYASWRNS |
| | SEQ ID NO: 1 | SGTIELVKKGCWEDDFNCYDRQECVATEENPQVYFCCCEGNF |
| | | CNERFTHLPEAGGPEVTYEPPPTAPT |
| 331 | N18X and L55E | ETRECIYYNANWELERTXQSGLERCEGEQDKRLHCYASWRNS |
| | mutant of SEQ ID | SGTIELVKKGCWEDDFNCYDRQECVATEENPQVYFCCCEGNF |
| | NO: 1 | CNERFTHLPEAGGPEVTYEPPPTAPT |
| 332 | N18Q and L55E | ETRECIYYNANWELERTQQSGLERCEGEQDKRLHCYASWRNS |
| | mutant of SEQ ID | SGTIELVKKGCWEDDFNCYDRQECVATEENPQVYFCCCEGNF |
| | NO: 1 | CNERFTHLPEAGGPEVTYEPPPTAPT |
| 333 | R40A mutant of | ETRECIYYNANWELERTNQSGLERCEGEQDKRLHCYASWANS |
| | SEQ ID NO: 1 | SGTIELVKKGCWLDDFNCYDRQECVATEENPQVYFCCCEGNF |
| | | CNERFTHLPEAGGPEVTYEPPPTAPT |
| 334 | N18X and R40A | ETRECIYYNANWELERTXQSGLERCEGEQDKRLHCYASWANS |
| | mutant of SEQ ID | SGTIELVKKGCWLDDFNCYDRQECVATEENPQVYFCCCEGNF |
| | NO: 1 | CNERFTHLPEAGGPEVTYEPPPTAPT |
| | | Wherein X is any amino acid that is not N |
| 335 | N18Q and R40A | ETRECIYYNANWELERTQQSGLERCEGEQDKRLHCYASWANS |
| | mutant of SEQ ID | SGTIELVKKGCWLDDFNCYDRQECVATEENPQVYFCCCEGNF |
| | NO: 1 | CNERFTHLPEAGGPEVTYEPPPTAPT |
| 336 | N18A mutant of | ETRECIYYNANWELERTAQSGLERCEGEQDKRLHCYASWRNS |
| | SEQ ID NO: 1 | SGTIELVKKGCWLDDFNCYDRQECVATEENPQVYFCCCEGNF |
| | | CNERFTHLPEAGGPEVTYEPPPTAPT |
| 337 | N18R mutant of | ETRECIYYNANWELERTRQSGLERCEGEQDKRLHCYASWRNS |
| | SEQ ID NO: 1 | SGTIELVKKGCWLDDFNCYDRQECVATEENPQVYFCCCEGNF |
| | | CNERFTHLPEAGGPEVTYEPPPTAPT |
| 338 | N18D mutant of | ETRECIYYNANWELERTDQSGLERCEGEQDKRLHCYASWRNS |
| | SEQ ID NO: 1 | SGTIELVKKGCWLDDFNCYDRQECVATEENPQVYFCCCEGNF |
| | | CNERFTHLPEAGGPEVTYEPPPTAPT |
| 339 | N18C mutant of | ETRECIYYNANWELERTCQSGLERCEGEQDKRLHCYASWRNS |
| | SEQ ID NO: 1 | SGTIELVKKGCWLDDFNCYDRQECVATEENPQVYFCCCEGNF |
| | | CNERFTHLPEAGGPEVTYEPPPTAPT |
| 340 | N18E mutant of | ETRECIYYNANWELERTEQSGLERCEGEQDKRLHCYASWRNS |
| | SEQ ID NO: 1 | SGTIELVKKGCWLDDFNCYDRQECVATEENPQVYFCCCEGNF |
| | | CNERFTHLPEAGGPEVTYEPPPTAPT |
| 341 | N18G mutant of | ETRECIYYNANWELERTGQSGLERCEGEQDKRLHCYASWRNS |
| | SEQ ID NO: 1 | SGTIELVKKGCWLDDFNCYDRQECVATEENPQVYFCCCEGNF |
| | | CNERFTHLPEAGGPEVTYEPPPTAPT |
| 342 | N18H mutant of | ETRECIYYNANWELERTHQSGLERCEGEQDKRLHCYASWRNS |
| | SEQ ID NO: 1 | SGTIELVKKGCWLDDFNCYDRQECVATEENPQVYFCCCEGNF |
| | | CNERFTHLPEAGGPEVTYEPPPTAPT |
| 343 | N18I mutant of | ETRECIYYNANWELERTIQSGLERCEGEQDKRLHCYASWRNSS |
| | SEQ ID NO: 1 | GTIELVKKGCWLDDFNCYDRQECVATEENPQVYFCCCEGNFC |
| | | NERFTHLPEAGGPEVTYEPPPTAPT |
| 344 | N18L mutant of | ETRECIYYNANWELERTLQSGLERCEGEQDKRLHCYASWRNS |
| | SEQ ID NO: 1 | SGTIELVKKGCWLDDFNCYDRQECVATEENPQVYFCCCEGNF |
| | | CNERFTHLPEAGGPEVTYEPPPTAPT |
| 345 | N18K mutant of | ETRECIYYNANWELERTKQSGLERCEGEQDKRLHCYASWRNS |
| | SEQ ID NO: 1 | SGTIELVKKGCWLDDFNCYDRQECVATEENPQVYFCCCEGNF |
| | | CNERFTHLPEAGGPEVTYEPPPTAPT |
| 346 | N18M mutant of | ETRECIYYNANWELERTMQSGLERCEGEQDKRLHCYASWRNS |
| | SEQ ID NO: 1 | SGTIELVKKGCWLDDFNCYDRQECVATEENPQVYFCCCEGNF |
| | | CNERFTHLPEAGGPEVTYEPPPTAPT |
| 347 | N18F mutant of | ETRECIYYNANWELERTFQSGLERCEGEQDKRLHCYASWRNS |
| | SEQ ID NO: 1 | SGTIELVKKGCWLDDFNCYDRQECVATEENPQVYFCCCEGNF |
| | | CNERFTHLPEAGGPEVTYEPPPTAPT |
| 348 | N18P mutant of | ETRECIYYNANWELERTPQSGLERCEGEQDKRLHCYASWRNS |
| | SEQ ID NO: 1 | SGTIELVKKGCWLDDFNCYDRQECVATEENPQVYFCCCEGNF |
| | | CNERFTHLPEAGGPEVTYEPPPTAPT |
| 349 | N18S mutant of | ETRECIYYNANWELERTSQSGLERCEGEQDKRLHCYASWRNS |
| | SEQ ID NO: 1 | SGTIELVKKGCWLDDFNCYDRQECVATEENPQVYFCCCEGNF |
| | | CNERFTHLPEAGGPEVTYEPPPTAPT |
| 350 | N18T mutant of | ETRECIYYNANWELERTTQSGLERCEGEQDKRLHCYASWRNS |
| | SEQ ID NO: 1 | SGTIELVKKGCWLDDFNCYDRQECVATEENPQVYFCCCEGNF |
| | | CNERFTHLPEAGGPEVTYEPPPTAPT |
| 351 | N18W mutant of | ETRECIYYNANWELERTWQSGLERCEGEQDKRLHCYASWRNS |
| | SEQ ID NO: 1 | SGTIELVKKGCWLDDFNCYDRQECVATEENPQVYFCCCEGNF |
| | | CNERFTHLPEAGGPEVTYEPPPTAPT |
| 352 | N18Y mutant of | ETRECIYYNANWELERTYQSGLERCEGEQDKRLHCYASWRNS |
| | SEQ ID NO: 1 | SGTIELVKKGCWLDDFNCYDRQECVATEENPQVYFCCCEGNF |
| | | CNERFTHLPEAGGPEVTYEPPPTAPT |
| 353 | N18V mutant of | ETRECIYYNANWELERTVQSGLERCEGEQDKRLHCYASWRNS |
| | SEQ ID NO: 1 | SGTIELVKKGCWLDDFNCYDRQECVATEENPQVYFCCCEGNF |
| | | CNERFTHLPEAGGPEVTYEPPPTAPT |
| 354 | N18A mutant of | ETRECIYYNANWELERTAQSGLERCEGEQDKRLHCYASWRNS |
| | SEQ ID NO: 1 | SGTIELVKKGCWLDDFNCYDRQECVATEENPQVYFCCCEGNF |
| | | CNERFTHLPEAGGPEVTYEPPPTAPT |
| 355 | S20A mutant of | ETRECIYYNANWELERTNQAGLERCEGEQDKRLHCYASWRNS |
| | SEQ ID NO: 1 | SGTIELVKKGCWLDDFNCYDRQECVATEENPQVYFCCCEGNF |
| | | CNERFTHLPEAGGPEVTYEPPPTAPT |
| 356 | S20R mutant of | ETRECIYYNANWELERTNQRGLERCEGEQDKRLHCYASWRNS |
| | SEQ ID NO: 1 | SGTIELVKKGCWLDDFNCYDRQECVATEENPQVYFCCCEGNF |
| | | CNERFTHLPEAGGPEVTYEPPPTAPT |
| 357 | S20N mutant of | ETRECIYYNANWELERTNQNGLERCEGEQDKRLHCYASWRNS |
| | SEQ ID NO: 1 | SGTIELVKKGCWLDDFNCYDRQECVATEENPQVYFCCCEGNF |
| | | CNERFTHLPEAGGPEVTYEPPPTAPT |
| 358 | S20D mutant of | ETRECIYYNANWELERTNQDGLERCEGEQDKRLHCYASWRNS |
| | SEQ ID NO: 1 | SGTIELVKKGCWLDDFNCYDRQECVATEENPQVYFCCCEGNF |
| | | CNERFTHLPEAGGPEVTYEPPPTAPT |
| 359 | S20C mutant of | ETRECIYYNANWELERTNQCGLERCEGEQDKRLHCYASWRNS |
| | SEQ ID NO: 1 | SGTIELVKKGCWLDDFNCYDRQECVATEENPQVYFCCCEGNF |
| | | CNERFTHLPEAGGPEVTYEPPPTAPT |
| 360 | S20Q mutant of | ETRECIYYNANWELERTNQQGLERCEGEQDKRLHCYASWRNS |
| | SEQ ID NO: 1 | SGTIELVKKGCWLDDFNCYDRQECVATEENPQVYFCCCEGNF |
| | | CNERFTHLPEAGGPEVTYEPPPTAPT |
| 361 | S20E mutant of | ETRECIYYNANWELERTNQEGLERCEGEQDKRLHCYASWRNS |
| | SEQ ID NO: 1 | SGTIELVKKGCWLDDFNCYDRQECVATEENPQVYFCCCEGNF |
| | | CNERFTHLPEAGGPEVTYEPPPTAPT |
| 362 | S20G mutant of | ETRECIYYNANWELERTNQGGLERCEGEQDKRLHCYASWRNS |
| | SEQ ID NO: 1 | SGTIELVKKGCWLDDFNCYDRQECVATEENPQVYFCCCEGNF |
| | | CNERFTHLPEAGGPEVTYEPPPTAPT |
| 363 | S20H mutant of | ETRECIYYNANWELERTNQHGLERCEGEQDKRLHCYASWRNS |
| | SEQ ID NO: 1 | SGTIELVKKGCWLDDFNCYDRQECVATEENPQVYFCCCEGNF |
| | | CNERFTHLPEAGGPEVTYEPPPTAPT |
| 364 | S20I mutant of | ETRECIYYNANWELERTNQIGLERCEGEQDKRLHCYASWRNSS |
| | SEQ ID NO: 1 | GTIELVKKGCWLDDFNCYDRQECVATEENPQVYFCCCEGNFC |
| | | NERFTHLPEAGGPEVTYEPPPTAPT |
| 365 | S20L mutant of | ETRECIYYNANWELERTNQLGLERCEGEQDKRLHCYASWRNS |
| | SEQ ID NO: 1 | SGTIELVKKGCWLDDFNCYDRQECVATEENPQVYFCCCEGNF |
| | | CNERFTHLPEAGGPEVTYEPPPTAPT |
| 366 | S20K mutant of | ETRECIYYNANWELERTNQKGLERCEGEQDKRLHCYASWRNS |
| | SEQ ID NO: 1 | SGTIELVKKGCWLDDFNCYDRQECVATEENPQVYFCCCEGNF |
| | | CNERFTHLPEAGGPEVTYEPPPTAPT |
| 367 | S20M mutant of | ETRECIYYNANWELERTNQMGLERCEGEQDKRLHCYASWRNS |
| | SEQ ID NO: 1 | SGTIELVKKGCWLDDFNCYDRQECVATEENPQVYFCCCEGNF |
| | | CNERFTHLPEAGGPEVTYEPPPTAPT |
| 368 | S20F mutant of | ETRECIYYNANWELERTNQFGLERCEGEQDKRLHCYASWRNS |
| | SEQ ID NO: 1 | SGTIELVKKGCWLDDFNCYDRQECVATEENPQVYFCCCEGNF |
| | | CNERFTHLPEAGGPEVTYEPPPTAPT |
| 369 | S20P mutant of | ETRECIYYNANWELERTNQPGLERCEGEQDKRLHCYASWRNS |
| | SEQ ID NO: 1 | SGTIELVKKGCWLDDFNCYDRQECVATEENPQVYFCCCEGNF |
| | | CNERFTHLPEAGGPEVTYEPPPTAPT |
| 370 | S20W mutant of | ETRECIYYNANWELERTNQWGLERCEGEQDKRLHCYASWRN |
| | SEQ ID NO: 1 | SSGTIELVKKGCWLDDFNCYDRQECVATEENPQVYFCCCEGN |
| | | FCNERFTHLPEAGGPEVTYEPPPTAPT |
| 371 | S20Y mutant of | ETRECIYYNANWELERTNQYGLERCEGEQDKRLHCYASWRNS |
| | SEQ ID NO: 1 | SGTIELVKKGCWLDDFNCYDRQECVATEENPQVYFCCCEGNF |
| | | CNERFTHLPEAGGPEVTYEPPPTAPT |
| 372 | S20V mutant of | ETRECIYYNANWELERTNQVGLERCEGEQDKRLHCYASWRNS |
| | SEQ ID NO: 1 | SGTIELVKKGCWLDDFNCYDRQECVATEENPQVYFCCCEGNF |
| | | CNERFTHLPEAGGPEVTYEPPPTAPT |
| 373 | S20X and L55D | ETRECIYYNANWELERTNQXGLERCEGEQDKRLHCYASWRNS |
| | mutant of SEQ ID | SGTIELVKKGCWDDDFNCYDRQECVATEENPQVYFCCCEGNF |
| | NO: 1 | CNERFTHLPEAGGPEVTYEPPPTAPT |
| | | Wherein X is any amino acid that is not S or T |
| 374 | S20X and L55E | ETRECIYYNANWELERTNQXGLERCEGEQDKRLHCYASWRNS |
| | mutant of SEQ ID | SGTIELVKKGCWEDDFNCYDRQECVATEENPQVYFCCCEGNF |
| | NO: 1 | CNERFTHLPEAGGPEVTYEPPPTAPT |
| | | Wherein X is any amino acid that is not S or T |
| 375 | S20X and R40A | ETRECIYYNANWELERTNQXGLERCEGEQDKRLHCYASWANS |
| | mutant of SEQ ID | SGTIELVKKGCWLDDFNCYDRQECVATEENPQVYFCCCEGNF |
| | NO: 1 | CNERFTHLPEAGGPEVTYEPPPTAPT |
| | | Wherein X is any amino acid that is not S or T |
| 376 | ActRIIB-ECD | ETRECIYYNANWELERTNQSGLERCEGDQDKRLHCYASWRNS |
| | fusion protein | SGTIELVKKGCWLDDINCYDRQECVATKENPQVYFCCCEGNF |
| | (without N18 or | CNERFTHLPEAGGPEVTYEPPPTAPTGGGGSESKYGPPCPPCPA |
| | S20 mutations) | PEFLGGPSVFLFPPKPKDTLMISRTPEVTCVVVDVSQEDPEVQF |
| | | NWYVDGVEVHNAKTKPREEQFNSTYRVVSVLTVLHQDWLNG |
| | | KEYKCKVSNKGLPSSIEKTISKAKGQPREPQVYTLPPSQEEMTK |
| | | NQVSLTCLVKGFYPSDIAVEWESNGQPENNYKTTPPVLDSDGS |
| | | FFLYSRLTVDKSRWQEGNVFSCSVMHEALHNHYTQKSLSLSL |
| | | G |
| 1651 | SEQ ID NO: 222 | MEFGLSWVFLVALLRGVQCETRECIYYNANWELERTQQSGLE |
| | with signal peptide | RCEGDQDKRLHCYASWRNSSGTIELVKKGCWLDDINCYDRQE |
| | (aa 1-19 is signal | CVATKENPQVYFCCCEGNFCNERFTHLPEAGGPEVTYEPPPTA |
| | peptide) | PTGGGGSESKYGPPCPPCPAPEFLGGPSVFLFPPKPKDTLMISRT |
| | | PEVTCVVVDVSQEDPEVQFNWYVDGVEVHNAKTKPREEQFNS |
| | | TYRVVSVLTVLHQDWLNGKEYKCKVSNKGLPSSIEKTISKAKG |
| | | QPREPQVYTLPPSQEEMTKNQVSLTCLVKGFYPSDIAVEWESN |
| | | GQPENNYKTTPPVLDSDGSFFLYSRLTVDKSRWQEGNVFSCSV |
| | | MHEALHNHYTQKSLSLSLG |
| 1652 | DNA sequence | ATGGAGTTTGGGCTGTCATGGGTTTTCCTCGTGGCCCTCCTC |
| | coding for SEQ ID | CGTGGAGTGCAGTGCGAAACTCGTGAGTGTATCTATTACAA |
| | NO: 1651 | CGCTAATTGGGAGCTCGAGCGGACTCAACAGAGCGGCCTTG |
| | | AACGATGTGAAGGGGATCAAGATAAACGTTTGCATTGTTAC |
| | | GCCAGTTGGAGGAACAGTTCCGGCACAATAGAGCTTGTCAA |
| | | GAAGGGTTGTTGGCTGGATGACATCAATTGTTATGATAGAC |
| | | AGGAATGTGTGGCTACAAAAGAAAACCCCCAAGTCTACTTT |
| | | TGCTGCTGTGAAGGGAATTTCTGTAATGAAAGATTTACCCA |
| | | CCTGCCAGAAGCAGGAGGACCCGAGGTAACATATGAGCCTC |
| | | CTCCAACAGCTCCCACAGGTGGTGGTGGTTCAGAATCCAAA |
| | | TATGGCCCACCATGTCCTCCTTGTCCCGCTCCTGAGTTCTTG |
| | | GGCGGACCCTCCGTCTTCCTGTTTCCCCCTAAGCCCAAGGAC |
| | | ACACTGATGATCTCTCGCACACCCGAAGTAACTTGTGTAGT |
| | | AGTTGACGTTTCTCAAGAGGATCCTGAAGTTCAGTTCAATTG |
| | | GTACGTCGATGGTGTGGAGGTGCACAACGCTAAAACAAAGC |
| | | CCCGCGAGGAGCAATTCAACTCCACTTATCGTGTCGTAAGC |
| | | GTACTCACCGTACTTCATCAAGACTGGCTGAATGGGAAAGA |
| | | ATACAAATGCAAGGTGTCTAATAAAGGCCTGCCATCTAGTA |
| | | TCGAGAAAACTATTTCCAAAGCCAAAGGCCAACCACGAGAG |
| | | CCCCAGGTCTATACTCTCCCTCCCTCTCAAGAAGAGATGACT |
| | | AAGAACCAGGTATCACTGACTTGTCTTGTCAAAGGATTTTAC |
| | | CCTAGCGATATCGCTGTAGAATGGGAAAGTAATGGGCAGCC |
| | | CGAGAACAACTATAAGACTACCCCTCCCGTTCTGGATAGCG |
| | | ACGGCTCTTTTTTTTTGTACAGTAGGCTTACAGTGGACAAGT |
| | | CCCGATGGCAAGAGGGCAATGTTTTTTCTTGTTCAGTGATGC |
| | | ACGAAGCACTGCATAACCACTATACACAAAAGTCTCTTTCC |
| | | TTGTCTTTGGGTTGA |
| 1653 | DNA sequence | GAAACTCGTGAGTGTATCTATTACAACGCTAATTGGGAGCT |
| | coding for SEQ ID | CGAGCGGACTCAACAGAGCGGCCTTGAACGATGTGAAGGG |
| | NO: 222 | GATCAAGATAAACGTTTGCATTGTTACGCCAGTTGGAGGAA |
| | | CAGTTCCGGCACAATAGAGCTTGTCAAGAAGGGTTGTTGGC |
| | | TGGATGACATCAATTGTTATGATAGACAGGAATGTGTGGCT |
| | | ACAAAAGAAAACCCCCAAGTCTACTTTTGCTGCTGTGAAGG |
| | | GAATTTCTGTAATGAAAGATTTACCCACCTGCCAGAAGCAG |
| | | GAGGACCCGAGGTAACATATGAGCCTCCTCCAACAGCTCCC |
| | | ACAGGTGGTGGTGGTTCAGAATCCAAATATGGCCCACCATG |
| | | TCCTCCTTGTCCCGCTCCTGAGTTCTTGGGCGGACCCTCCGT |
| | | CTTCCTGTTTCCCCCTAAGCCCAAGGACACACTGATGATCTC |
| | | TCGCACACCCGAAGTAACTTGTGTAGTAGTTGACGTTTCTCA |
| | | AGAGGATCCTGAAGTTCAGTTCAATTGGTACGTCGATGGTG |
| | | TGGAGGTGCACAACGCTAAAACAAAGCCCCGCGAGGAGCA |
| | | ATTCAACTCCACTTATCGTGTCGTAAGCGTACTCACCGTACT |
| | | TCATCAAGACTGGCTGAATGGGAAAGAATACAAATGCAAG |
| | | GTGTCTAATAAAGGCCTGCCATCTAGTATCGAGAAAACTAT |
| | | TTCCAAAGCCAAAGGCCAACCACGAGAGCCCCAGGTCTATA |
| | | CTCTCCCTCCCTCTCAAGAAGAGATGACTAAGAACCAGGTA |
| | | TCACTGACTTGTCTTGTCAAAGGATTTTACCCTAGCGATATC |
| | | GCTGTAGAATGGGAAAGTAATGGGCAGCCCGAGAACAACT |
| | | ATAAGACTACCCCTCCCGTTCTGGATAGCGACGGCTCTTTTT |
| | | TTTTGTACAGTAGGCTTACAGTGGACAAGTCCCGATGGCAA |
| | | GAGGGCAATGTTTTTTCTTGTTCAGTGATGCACGAAGCACTG |
| | | CATAACCACTATACACAAAAGTCTCTTTCCTTGTCTTTGGGT |
| | | TGA |
| 1654 | Truncated wild- | ETQECLFFNANWEKDRTNQTGVEPCYGDKDKRRHCFATWKNI |
| | type ActRIIA-ECD | SGSIEIVKQGCWLDDINCYDRTDCVEKKDSPEVYFCCCEGNMC |
| | (amino acids 7-110 | NEKFSYFPEMEVTQPTSNPVTPKPP |
| | of SEQ ID NO: 48) | |
| 1655 | N18X mutant of | ETQECLFFNANWEKDRTXQTGVEPCYGDKDKRRHCFATWKNI |
| | SEQ ID NO: 1654 | SGSIEIVKQGCWLDDINCYDRTDCVEKKDSPEVYFCCCEGNMC |
| | | NEKFSYFPEMEVTQPTSNPVTPKPP |
| | | wherein X is any amino acid other than N |
| 1656 | N18Q mutant of | ETQECLFFNANWEKDRTQQTGVEPCYGDKDKRRHCFATWKNI |
| | SEQ ID NO: 1654 | SGSIEIVKQGCWLDDINCYDRTDCVEKKDSPEVYFCCCEGNMC |
| | | NEKFSYFPEMEVTQPTSNPVTPKPP |
| 1657 | T20X mutant of | ETQECLFFNANWEKDRTNQXGVEPCYGDKDKRRHCFATWKN |
| | SEQ ID NO: 1654 | ISGSIEIVKQGCWLDDINCYDRTDCVEKKDSPEVYFCCCEGNM |
| | | CNEKFSYFPEMEVTQPTSNPVTPKPP |
| | | wherein X is any amino acid other than S or T |
| 1658 | ActRIIB-ECD | ETRECIYYNANWELERTNQSGLERCEGEQDKRLHCYASWRNS |
| | polypeptide in | SGTIELVKKGCWDDDFNCYDRQECVATEENPQVYFCCCEGNF |
| | Luspatercept | CNERFTHLPEAGGPEVTYEPPPT |
| 1659 | N18X mutation of | ETRECIYYNANWELERTXQSGLERCEGEQDKRLHCYASWRNS |
| | SEQ ID NO: 1658 | SGTIELVKKGCWDDDFNCYDRQECVATEENPQVYFCCCEGNF |
| | | CNERFTHLPEAGGPEVTYEPPPT |
| | | wherein X is any amino acid other than N |
| 1660 | N18Q mutation of | ETRECIYYNANWELERTQQSGLERCEGEQDKRLHCYASWRNS |
| | SEQ ID NO: 1658 | SGTIELVKKGCWDDDFNCYDRQECVATEENPQVYFCCCEGNF |
| | | CNERFTHLPEAGGPEVTYEPPPT |
| 1661 | S20X mutation of | TRECIYYNANWELERTNQXGLERCEGEQDKRLHCYASWRNSS |
| | SEQ ID NO: 1658 | GTIELVKKGCWDDDFNCYDRQECVATEENPQVYFCCCEGNFC |
| | | NERFTHLPEAGGPEVTYEPPPT |
| | | wherein X is any amino acid other than S or T |
| 1664 | N18X mutation of | ETRECIYYNANWELERTXQSGLERCEGEQDKRLHCYASWRNS |
| | luspatercept | SGTIELVKKGCWDDDFNCYDRQECVATEENPQVYFCCCEGNF |
| | | CNERFTHLPEAGGPEVTYEPPPTGGGTHTCPPCPAPELLGGPSV |
| | | FLFPPKPKDTLMISRTPEVTCVVVDVSHEDPEVKFNWYVDGV |
| | | EVHNAKTKPREEQYNSTYRVVSVLTVLHQDWLNGKEYKCK |
| | | VSNKALPAPIEKTISKAKGQPREPQVYTLPPSREEMTKNQ |
| | | VSLTCLVKGFYPSDIAVEWESNGQPENNYKTTPPVLDSDG |
| | | SFFLYSKLTVDKSRWQQGNVFSCSVMHEALHNHYTQKSLS |
| | | LSPGK |
| | | wherein X is any amino acid other than N |
| 1665 | N18X mutation of | ILGRSETQECLFFNANWEKDRTXQTGVEPCYGDKDKRRHCFA |
| | sotatercept | TWKNISGSIEIVKQGCWLDDINCYDRTDCVEKKDSPEVYFCCC |
| | | EGNMCNEKFSYFPEMEVTQPTSNPVTPKPPTGGGTHTCPPCPA |
| | | PELLGGPSVFLFPPKPKDTLMISRTPEVTCVVVDVSHEDPEVKF |
| | | NWYVDGVEVHNAKTKPREEQYNSTYRVVSVLTVLHQDWLNG |
| | | KEYKCKVSNKALPVPIEKTISKAKGQPREPQVYTLPPSREEMTK |
| | | NQVSLTCLVKGFYPSDIAVEWESNGQPENNYKTTPPVLDSDGS |
| | | FFLYSKLTVDKSRWQQGNVFSCSVMHEALHNHYTQKSLSLSP |
| | | GK |
| | | wherein X is any amino acid other than N |

TABLE 10
Additional Sequences (SEQ ID 377-1650)

| SEQ | | |
|---|---|---|
| ID | | |
| NO: | Notes | Sequences |
| 377 | N-terminal 5 aa truncation of | AETRECIYYNANWELERTNQSGLERCEGEQDKRLHCYASWRNSSGTIELVK |
| | Wild-type human ActRIIB | KGCWLDDFNCYDRQECVATEENPQVYFCCCEGNFCNERFTHLPEAGGPEVT |
| | extracellular domain (N- | YEPPPTAPT |
| | terminal 5 aa truncation of | |
| | SEQ ID NO: 46) | |
| 378 | N-terminal 4 aa truncation of | EAETRECIYYNANWELERTNQSGLERCEGEQDKRLHCYASWRNSSGTIELV |
| | Wild-type human ActRIIB | KKGCWLDDFNCYDRQECVATEENPQVYFCCCEGNFCNERFTHLPEAGGPEV |
| | extracellular domain (N- | TYEPPPTAPT |
| | terminal 4 aa truncation of | |
| | SEQ ID NO: 46) | |
| 379 | N-terminal 3 aa truncation of | GEAETRECIYYNANWELERTNQSGLERCEGEQDKRLHCYASWRNSSGTIEL |
| | Wild-type human ActRIIB | VKKGCWLDDFNCYDRQECVATEENPQVYFCCCEGNFCNERFTHLPEAGGPE |
| | extracellular domain (N- | VTYEPPPTAPT |
| | terminal 3 aa truncation of | |
| | SEQ ID NO: 46) | |
| 380 | N-terminal 2 aa truncation of | RGEAETRECIYYNANWELERTNQSGLERCEGEQDKRLHCYASWRNSSGTIE |
| | Wild-type human ActRIIB | LVKKGCWLDDFNCYDRQECVATEENPQVYFCCCEGNFCNERFTHLPEAGGP |
| | extracellular domain (N- | EVTYEPPPTAPT |
| | terminal 2 aa truncation of | |
| | SEQ ID NO: 46) | |
| 381 | N-terminal 1 aa truncation of | GRGEAETRECIYYNANWELERTNQSGLERCEGEQDKRLHCYASWRNSSGTI |
| | Wild-type human ActRIIB | ELVKKGCWLDDFNCYDRQECVATEENPQVYFCCCEGNFCNERFTHLPEAGG |
| | extracellular domain (N- | PEVTYEPPPTAPT |
| | terminal 1 aa truncation of | |
| | SEQ ID NO: 46) | |
| 382 | N19Q mutation of N- | AETRECIYYNANWELERTQQSGLERCEGEQDKRLHCYASWRNSSGTIELVK |
| | terminal 5 aa truncation of | KGCWLDDFNCYDRQECVATEENPQVYFCCCEGNFCNERFTHLPEAGGPEVT |
| | Wild-type human ActRIIB | YEPPPTAPT |
| | extracellular domain (N- | |
| | terminal 5 aa truncation of | |
| | SEQ ID NO: 46) | |
| 383 | N20Q mutation of N- | EAETRECIYYNANWELERTQQSGLERCEGEQDKRLHCYASWRNSSGTIELV |
| | terminal 4 aa truncation of | KKGCWLDDFNCYDRQECVATEENPQVYFCCCEGNFCNERFTHLPEAGGPEV |
| | Wild-type human ActRIIB | TYEPPPTAPT |
| | extracellular domain (N- | |
| | terminal 4 aa truncation of | |
| | SEQ ID NO: 46) | |
| 384 | N21Q mutation of N- | GEAETRECIYYNANWELERTQQSGLERCEGEQDKRLHCYASWRNSSGTIEL |
| | terminal 3 aa truncation of | VKKGCWLDDFNCYDRQECVATEENPQVYFCCCEGNFCNERFTHLPEAGGPE |
| | Wild-type human ActRIIB | VTYEPPPTAPT |
| | extracellular domain (N- | |
| | terminal 3 aa truncation of | |
| | SEQ ID NO: 46) | |
| 385 | N22Q mutation of N- | RGEAETRECIYYNANWELERTQQSGLERCEGEQDKRLHCYASWRNSSGTIE |
| | terminal 2 aa truncation of | LVKKGCWLDDFNCYDRQECVATEENPQVYFCCCEGNFCNERFTHLPEAGGP |
| | Wild-type human ActRIIB | EVTYEPPPTAPT |
| | extracellular domain (N- | |
| | terminal 2 aa truncation of | |
| | SEQ ID NO: 46) | |
| 386 | N23Q mutation of N- | GRGEAETRECIYYNANWELERTQQSGLERCEGEQDKRLHCYASWRNSSGTI |
| | terminal 1 aa truncation of | ELVKKGCWLDDFNCYDRQECVATEENPQVYFCCCEGNFCNERFTHLPEAGG |
| | Wild-type human ActRIIB | PEVTYEPPPTAPT |
| | extracellular domain (N- | |
| | terminal 1 aa truncation of | |
| | SEQ ID NO: 46) | |
| 387 | N24Q mutation of Wild-type | SGRGEAETRECIYYNANWELERTQQSGLERCEGEQDKRLHCYASWRNSSGT |
| | human ActRIIB extracellular | IELVKKGCWLDDFNCYDRQECVATEENPQVYFCCCEGNFCNERFTHLPEAG |
| | domain (N-terminal 1 aa | GPEVTYEPPPTAPT |
| | truncation of SEQ ID NO: | |
| | 46) | |
| 1666 | Hybrid hu-ActRIIB-ECD | AETRECIYYNANWELERTNQSGLERCYGDKDKRRHCYASWRNSSGTIELVK |
| | (SEQ ID NO: 3) with 1 | KGCWLDDINCYDRTDCVEKKDSPEVYFCCCEGNFCNERFTHLPEAGGPEVT |
| | additional aa at N-terminus | YEPPPTAPT |
| 388 | Hybrid hu-ActRIIB-ECD | EAETRECIYYNANWELERTNQSGLERCYGDKDKRRHCYASWRNSSGTIELV |
| | (SEQ ID NO: 3) with 2 | KKGCWLDDINCYDRTDCVEKKDSPEVYFCCCEGNFCNERFTHLPEAGGPEV |
| | additional aa at N-terminus | TYEPPPTAPT |
| 389 | Hybrid hu-ActRIIB-ECD | GEAETRECIYYNANWELERTNQSGLERCYGDKDKRRHCYASWRNSSGTIEL |
| | (SEQ ID NO: 3) with 3 | VKKGCWLDDINCYDRTDCVEKKDSPEVYFCCCEGNFCNERFTHLPEAGGPE |
| | additional aa at N-terminus | VTYEPPPTAPT |
| 390 | Hybrid hu-ActRIIB-ECD | RGEAETRECIYYNANWELERTNQSGLERCYGDKDKRRHCYASWRNSSGTIE |
| | (SEQ ID NO: 3) with 4 | LVKKGCWLDDINCYDRTDCVEKKDSPEVYFCCCEGNFCNERFTHLPEAGGP |
| | additional aa at N-terminus | EVTYEPPPTAPT |
| 391 | Hybrid hu-ActRIIB-ECD | GRGEAETRECIYYNANWELERTNQSGLERCYGDKDKRRHCYASWRNSSGTI |
| | (SEQ ID NO: 3) with 5 | ELVKKGCWLDDINCYDRTDCVEKKDSPEVYFCCCEGNFCNERFTHLPEAGG |
| | additional aa at N-terminus | PEVTYEPPPTAPT |
| 392 | Hybrid hu-ActRIIB-ECD | SGRGEAETRECIYYNANWELERTNQSGLERCYGDKDKRRHCYASWRNSSG |
| | (SEQ ID NO: 3) with 6 | TIELVKKGCWLDDINCYDRTDCVEKKDSPEVYFCCCEGNFCNERFTHLPEAG |
| | additional aa at N-terminus | GPEVTYEPPPTAPT |
| 393 | Hybrid hu-ActRIIB-ECD | AETRECIYYNANWELERTNQSGLERCYGDKDKRRHCYASWRNSSGTIELVK |
| | (SEQ ID NO: 4) with 1 | KGCWLDDFNCYDRTDCVEKKDSPEVYFCCCEGNFCNERFTHLPEAGGPEVT |
| | additional aa at N-terminus | YEPPPTAPT |
| 394 | Hybrid hu-ActRIIB-ECD | EAETRECIYYNANWELERTNQSGLERCYGDKDKRRHCYASWRNSSGTIELV |
| | (SEQ ID NO: 4) with 2 | KKGCWLDDFNCYDRTDCVEKKDSPEVYFCCCEGNFCNERFTHLPEAGGPEV |
| | additional aa at N-terminus | TYEPPPTAPT |
| 395 | Hybrid hu-ActRIIB-ECD | GEAETRECIYYNANWELERTNQSGLERCYGDKDKRRHCYASWRNSSGTIEL |
| | (SEQ ID NO: 4) with 3 | VKKGCWLDDFNCYDRTDCVEKKDSPEVYFCCCEGNFCNERFTHLPEAGGPE |
| | additional aa at N-terminus | VTYEPPPTAPT |
| 396 | Hybrid hu-ActRIIB-ECD | RGEAETRECIYYNANWELERTNQSGLERCYGDKDKRRHCYASWRNSSGTIE |
| | (SEQ ID NO: 4) with 4 | LVKKGCWLDDFNCYDRTDCVEKKDSPEVYFCCCEGNFCNERFTHLPEAGGP |
| | additional aa at N-terminus | EVTYEPPPTAPT |
| 397 | Hybrid hu-ActRIIB-ECD | GRGEAETRECIYYNANWELERTNQSGLERCYGDKDKRRHCYASWRNSSGTI |
| | (SEQ ID NO: 4) with 5 | ELVKKGCWLDDFNCYDRTDCVEKKDSPEVYFCCCEGNFCNERFTHLPEAGG |
| | additional aa at N-terminus | PEVTYEPPPTAPT |
| 398 | Hybrid hu-ActRIIB-ECD | SGRGEAETRECIYYNANWELERTNQSGLERCYGDKDKRRHCYASWRNSSG |
| | (SEQ ID NO: 4) with 6 | TIELVKKGCWLDDFNCYDRTDCVEKKDSPEVYFCCCEGNFCNERFTHLPEA |
| | additional aa at N-terminus | GGPEVTYEPPPTAPT |
| 399 | Hybrid hu-ActRIIB-ECD | AETRECIYYNANWELERTNQSGLERCEGEQDKRLHCYASWRNSSGTIELVK |
| | (SEQ ID NO: 5) with 1 | KGCWLDDINCYDRTDCVEKKDSPEVYFCCCEGNFCNERFTHLPEAGGPEVT |
| | additional aa at N-terminus | YEPPPTAPT |
| 400 | Hybrid hu-ActRIIB-ECD | EAETRECIYYNANWELERTNQSGLERCEGEQDKRLHCYASWRNSSGTIELV |
| | (SEQ ID NO: 5) with 2 | KKGCWLDDINCYDRTDCVEKKDSPEVYFCCCEGNFCNERFTHLPEAGGPEV |
| | additional aa at N-terminus | TYEPPPTAPT |
| 401 | Hybrid hu-ActRIIB-ECD | GEAETRECIYYNANWELERTNQSGLERCEGEQDKRLHCYASWRNSSGTIEL |
| | (SEQ ID NO: 5) with 3 | VKKGCWLDDINCYDRTDCVEKKDSPEVYFCCCEGNFCNERFTHLPEAGGPE |
| | additional aa at N-terminus | VTYEPPPTAPT |
| 402 | Hybrid hu-ActRIIB-ECD | RGEAETRECIYYNANWELERTNQSGLERCEGEQDKRLHCYASWRNSSGTIE |
| | (SEQ ID NO: 5) with 4 | LVKKGCWLDDINCYDRTDCVEKKDSPEVYFCCCEGNFCNERFTHLPEAGGP |
| | additional aa at N-terminus | EVTYEPPPTAPT |
| 403 | Hybrid hu-ActRIIB-ECD | GRGEAETRECIYYNANWELERTNQSGLERCEGEQDKRLHCYASWRNSSGTI |
| | (SEQ ID NO: 5) with 5 | ELVKKGCWLDDINCYDRTDCVEKKDSPEVYFCCCEGNFCNERFTHLPEAGG |
| | additional aa at N-terminus | PEVTYEPPPTAPT |
| 404 | Hybrid hu-ActRIIB-ECD | SGRGEAETRECIYYNANWELERTNQSGLERCEGEQDKRLHCYASWRNSSGT |
| | (SEQ ID NO: 5) with 6 | IELVKKGCWLDDINCYDRTDCVEKKDSPEVYFCCCEGNFCNERFTHLPEAG |
| | additional aa at N-terminus | GPEVTYEPPPTAPT |
| 405 | Hybrid hu-ActRIIB-ECD | AETRECIYYNANWELERTNQSGLERCEGEQDKRLHCYASWRNSSGTIELVK |
| | (SEQ ID NO: 6) with 1 | KGCWLDDINCYDRTDCVEKKDSPQVYFCCCEGNFCNERFTHLPEAGGPEVT |
| | additional aa at N-terminus | YEPPPTAPT |
| 406 | Hybrid hu-ActRIIB-ECD | EAETRECIYYNANWELERTNQSGLERCEGEQDKRLHCYASWRNSSGTIELV |
| | (SEQ ID NO: 6) with 2 | KKGCWLDDINCYDRTDCVEKKDSPQVYFCCCEGNFCNERFTHLPEAGGPEV |
| | additional aa at N-terminus | TYEPPPTAPT |
| 407 | Hybrid hu-ActRIIB-ECD | GEAETRECIYYNANWELERTNQSGLERCEGEQDKRLHCYASWRNSSGTIEL |
| | (SEQ ID NO: 6) with 3 | VKKGCWLDDINCYDRTDCVEKKDSPQVYFCCCEGNFCNERFTHLPEAGGPE |
| | additional aa at N-terminus | VTYEPPPTAPT |
| 408 | Hybrid hu-ActRIIB-ECD | RGEAETRECIYYNANWELERTNQSGLERCEGEQDKRLHCYASWRNSSGTIE |
| | (SEQ ID NO: 6) with 4 | LVKKGCWLDDINCYDRTDCVEKKDSPQVYFCCCEGNFCNERFTHLPEAGGP |
| | additional aa at N-terminus | EVTYEPPPTAPT |
| 409 | Hybrid hu-ActRIIB-ECD | GRGEAETRECIYYNANWELERTNQSGLERCEGEQDKRLHCYASWRNSSGTI |
| | (SEQ ID NO: 6) with 5 | ELVKKGCWLDDINCYDRTDCVEKKDSPQVYFCCCEGNFCNERFTHLPEAGG |
| | additional aa at N-terminus | PEVTYEPPPTAPT |
| 410 | Hybrid hu-ActRIIB-ECD | SGRGEAETRECIYYNANWELERTNQSGLERCEGEQDKRLHCYASWRNSSGT |
| | (SEQ ID NO: 6) with 6 | IELVKKGCWLDDINCYDRTDCVEKKDSPQVYFCCCEGNFCNERFTHLPEAG |
| | additional aa at N-terminus | GPEVTYEPPPTAPT |
| 411 | Hybrid hu-ActRIIB-ECD | AETRECIYYNANWELERTNQSGLERCEGEQDKRLHCYASWRNSSGTIELVK |
| | (SEQ ID NO: 7) with 1 | KGCWLDDFNCYDRTDCVEKKDSPQVYFCCCEGNFCNERFTHLPEAGGPEVT |
| | additional aa at N-terminus | YEPPPTAPT |
| 412 | Hybrid hu-ActRIIB-ECD | EAETRECIYYNANWELERTNQSGLERCEGEQDKRLHCYASWRNSSGTIELV |
| | (SEQ ID NO: 7) with 2 | KKGCWLDDFNCYDRTDCVEKKDSPQVYFCCCEGNFCNERFTHLPEAGGPEV |
| | additional aa at N-terminus | TYEPPPTAPT |
| 413 | Hybrid hu-ActRIIB-ECD | GEAETRECIYYNANWELERTNQSGLERCEGEQDKRLHCYASWRNSSGTIEL |
| | (SEQ ID NO: 7) with 3 | VKKGCWLDDFNCYDRTDCVEKKDSPQVYFCCCEGNFCNERFTHLPEAGGPE |
| | additional aa at N-terminus | VTYEPPPTAPT |
| 414 | Hybrid hu-ActRIIB-ECD | RGEAETRECIYYNANWELERTNQSGLERCEGEQDKRLHCYASWRNSSGTIE |
| | (SEQ ID NO: 7) with 4 | LVKKGCWLDDFNCYDRTDCVEKKDSPQVYFCCCEGNFCNERFTHLPEAGGP |
| | additional aa at N-terminus | EVTYEPPPTAPT |
| 415 | Hybrid hu-ActRIIB-ECD | GRGEAETRECIYYNANWELERTNQSGLERCEGEQDKRLHCYASWRNSSGTI |
| | (SEQ ID NO: 7) with 5 | ELVKKGCWLDDFNCYDRTDCVEKKDSPQVYFCCCEGNFCNERFTHLPEAG |
| | additional aa at N-terminus | GPEVTYEPPPTAPT |
| 416 | Hybrid hu-ActRIIB-ECD | SGRGEA |
| | (SEQ ID NO: 7) with 6 | ETRECIYYNANWELERTNQSGLERCEGEQDKRLHCYASWRNSSGTIELVKK |
| | additional aa at N-terminus | GCWLDDFNCYDRTDCVEKKDSPQVYFCCCEGNFCNERFTHLPEAGGPEVTY |
| | | EPPPTAPT |
| 417 | Hybrid hu-ActRIIB-ECD | AETRECIYYNANWELERTNQSGLERCEGEQDKRLHCYASWRNSSGTIELVK |
| | (SEQ ID NO: 8) with 1 | KGCWLDDFNCYDRTDCVEKKDSPEVYFCCCEGNFCNERFTHLPEAGGPEVT |
| | additional aa at N-terminus | YEPPPTAPT |
| 418 | Hybrid hu-ActRIIB-ECD | EAETRECIYYNANWELERTNQSGLERCEGEQDKRLHCYASWRNSSGTIELV |
| | (SEQ ID NO: 8) with 2 | KKGCWLDDFNCYDRTDCVEKKDSPEVYFCCCEGNFCNERFTHLPEAGGPEV |
| | additional aa at N-terminus | TYEPPPTAPT |
| 419 | Hybrid hu-ActRIIB-ECD | GEAETRECIYYNANWELERTNQSGLERCEGEQDKRLHCYASWRNSSGTIEL |
| | (SEQ ID NO: 8) with 3 | VKKGCWLDDFNCYDRTDCVEKKDSPEVYFCCCEGNFCNERFTHLPEAGGPE |
| | additional aa at N-terminus | VTYEPPPTAPT |
| 420 | Hybrid hu-ActRIIB-ECD | RGEAETRECIYYNANWELERTNQSGLERCEGEQDKRLHCYASWRNSSGTIE |
| | (SEQ ID NO: 8) with 4 | LVKKGCWLDDFNCYDRTDCVEKKDSPEVYFCCCEGNFCNERFTHLPEAGGP |
| | additional aa at N-terminus | EVTYEPPPTAPT |
| 421 | Hybrid hu-ActRIIB-ECD | GRGEAETRECIYYNANWELERTNQSGLERCEGEQDKRLHCYASWRNSSGTI |
| | (SEQ ID NO: 8) with 5 | ELVKKGCWLDDFNCYDRTDCVEKKDSPEVYFCCCEGNFCNERFTHLPEAGG |
| | additional aa at N-terminus | PEVTYEPPPTAPT |
| 422 | Hybrid hu-ActRIIB-ECD | SGRGEAETRECIYYNANWELERTNQSGLERCEGEQDKRLHCYASWRNSSGT |
| | (SEQ ID NO: 8) with 6 | IELVKKGCWLDDFNCYDRTDCVEKKDSPEVYFCCCEGNFCNERFTHLPEAG |
| | additional aa at N-terminus | GPEVTYEPPPTAPT |
| 423 | Hybrid hu-ActRIIB-ECD | AETRECIYYNANWELERTNQSGLERCEGEQDKRLHCYASWRNSSGTIELVK |
| | (SEQ ID NO: 9) with 1 | KGCWLDDFNCYDRQECVEKKDSPEVYFCCCEGNFCNERFTHLPEAGGPEVT |
| | additional aa at N-terminus | YEPPPTAPT |
| 424 | Hybrid hu-ActRIIB-ECD | EAETRECIYYNANWELERTNQSGLERCEGEQDKRLHCYASWRNSSGTIELV |
| | (SEQ ID NO: 9) with 2 | KKGCWLDDFNCYDRQECVEKKDSPEVYFCCCEGNFCNERFTHLPEAGGPEV |
| | additional aa at N-terminus | TYEPPPTAPT |
| 425 | Hybrid hu-ActRIIB-ECD | GEAETRECIYYNANWELERTNQSGLERCEGEQDKRLHCYASWRNSSGTIEL |
| | (SEQ ID NO: 9) with 3 | VKKGCWLDDFNCYDRQECVEKKDSPEVYFCCCEGNFCNERFTHLPEAGGPE |
| | additional aa at N-terminus | VTYEPPPTAPT |
| 426 | Hybrid hu-ActRIIB-ECD | RGEAETRECIYYNANWELERTNQSGLERCEGEQDKRLHCYASWRNSSGTIE |
| | (SEQ ID NO: 9) with 4 | LVKKGCWLDDFNCYDRQECVEKKDSPEVYFCCCEGNFCNERFTHLPEAGGP |
| | additional aa at N-terminus | EVTYEPPPTAPT |
| 427 | Hybrid hu-ActRIIB-ECD | GRGEAETRECIYYNANWELERTNQSGLERCEGEQDKRLHCYASWRNSSGTI |
| | (SEQ ID NO: 9) with 5 | ELVKKGCWLDDFNCYDRQECVEKKDSPEVYFCCCEGNFCNERFTHLPEAGG |
| | additional aa at N-terminus | PEVTYEPPPTAPT |
| 428 | Hybrid hu-ActRIIB-ECD | SGRGEAETRECIYYNANWELERTNQSGLERCEGEQDKRLHCYASWRNSSGT |
| | (SEQ ID NO: 9) with 6 | IELVKKGCWLDDFNCYDRQECVEKKDSPEVYFCCCEGNFCNERFTHLPEAG |
| | additional aa at N-terminus | GPEVTYEPPPTAPT |
| 429 | Hybrid hu-ActRIIB-ECD | AETRECIYYNANWELERTNQSGLERCEGEQDKRLHCYASWRNSSGTIELVK |
| | (SEQ ID NO: 10) with 1 | KGCWLDDFNCYDRQECVEKKDSPQVYFCCCEGNFCNERFTHLPEAGGPEVT |
| | additional aa at N-terminus | YEPPPTAPT |
| 430 | Hybrid hu-ActRIIB-ECD | EAETRECIYYNANWELERTNQSGLERCEGEQDKRLHCYASWRNSSGTIELV |
| | (SEQ ID NO: 10) with 2 | KKGCWLDDFNCYDRQECVEKKDSPQVYFCCCEGNFCNERFTHLPEAGGPEV |
| | additional aa at N-terminus | TYEPPPTAPT |
| 431 | Hybrid hu-ActRIIB-ECD | GEAETRECIYYNANWELERTNQSGLERCEGEQDKRLHCYASWRNSSGTIEL |
| | (SEQ ID NO: 10) with 3 | VKKGCWLDDFNCYDRQECVEKKDSPQVYFCCCEGNFCNERFTHLPEAGGPE |
| | additional aa at N-terminus | VTYEPPPTAPT |
| 432 | Hybrid hu-ActRIIB-ECD | RGEAETRECIYYNANWELERTNQSGLERCEGEQDKRLHCYASWRNSSGTIE |
| | (SEQ ID NO: 10) with 4 | LVKKGCWLDDFNCYDRQECVEKKDSPQVYFCCCEGNFCNERFTHLPEAGGP |
| | additional aa at N-terminus | EVTYEPPPTAPT |
| 433 | Hybrid hu-ActRIIB-ECD | GRGEAETRECIYYNANWELERTNQSGLERCEGEQDKRLHCYASWRNSSGTI |
| | (SEQ ID NO: 10) with 5 | ELVKKGCWLDDFNCYDRQECVEKKDSPQVYFCCCEGNFCNERFTHLPEAG |
| | additional aa at N-terminus | GPEVTYEPPPTAPT |
| 434 | Hybrid hu-ActRIIB-ECD | SGRGEAETRECIYYNANWELERTNQSGLERCEGEQDKRLHCYASWRNSSGT |
| | (SEQ ID NO: 10) with 6 | IELVKKGCWLDDFNCYDRQECVEKKDSPQVYFCCCEGNFCNERFTHLPEAG |
| | additional aa at N-terminus | GPEVTYEPPPTAPT |
| 435 | Hybrid hu-ActRIIB-ECD | ATRECIYYNANWELERTNQSGLERCEGEQDKRLHCYASWRNSSGTIELVKK |
| | (SEQ ID NO: 11) with 1 | GCWLDDINCYDRQECVEKKDSPEVYFCCCEGNFCNERFTHLPEAGGPEVTY |
| | additional aa at N-terminus | EPPPTAPT |
| 436 | Hybrid hu-ActRIIB-ECD | EATRECIYYNANWELERTNQSGLERCEGEQDKRLHCYASWRNSSGTIELVK |
| | (SEQ ID NO: 11) with 2 | KGCWLDDINCYDRQECVEKKDSPEVYFCCCEGNFCNERFTHLPEAGGPEVT |
| | additional aa at N-terminus | YEPPPTAPT |
| 437 | Hybrid hu-ActRIIB-ECD | GEATRECIYYNANWELERTNQSGLERCEGEQDKRLHCYASWRNSSGTIELV |
| | (SEQ ID NO: 11) with 3 | KKGCWLDDINCYDRQECVEKKDSPEVYFCCCEGNFCNERFTHLPEAGGPEV |
| | additional aa at N-terminus | TYEPPPTAPT |
| 438 | Hybrid hu-ActRIIB-ECD | RGEATRECIYYNANWELERTNQSGLERCEGEQDKRLHCYASWRNSSGTIEL |
| | (SEQ ID NO: 11) with 4 | VKKGCWLDDINCYDRQECVEKKDSPEVYFCCCEGNFCNERFTHLPEAGGPE |
| | additional aa at N-terminus | VTYEPPPTAPT |
| 439 | Hybrid hu-ActRIIB-ECD | GRGEATRECIYYNANWELERTNQSGLERCEGEQDKRLHCYASWRNSSGTIE |
| | (SEQ ID NO: 11) with 5 | LVKKGCWLDDINCYDRQECVEKKDSPEVYFCCCEGNFCNERFTHLPEAGGP |
| | additional aa at N-terminus | EVTYEPPPTAPT |
| 440 | Hybrid hu-ActRIIB-ECD | SGRGEATRECIYYNANWELERTNQSGLERCEGEQDKRLHCYASWRNSSGTI |
| | (SEQ ID NO: 11) with 6 | ELVKKGCWLDDINCYDRQECVEKKDSPEVYFCCCEGNFCNERFTHLPEAGG |
| | additional aa at N-terminus | PEVTYEPPPTAPT |
| 441 | Hybrid hu-ActRIIB-ECD | AETRECIYYNANWELERTNQSGLERCEGEQDKRLHCYASWRNSSGTIELVK |
| | (SEQ ID NO: 12) with 1 | KGCWLDDFNCYDRTDCVEKKDSPEVYFCCCEGNMCNERFTHLPEAGGPEV |
| | additional aa at N-terminus | TYEPPPTAPT |
| 442 | Hybrid hu-ActRIIB-ECD | EAETRECIYYNANWELERTNQSGLERCEGEQDKRLHCYASWRNSSGTIELV |
| | (SEQ ID NO: 12) with 2 | KKGCWLDDFNCYDRTDCVEKKDSPEVYFCCCEGNMCNERFTHLPEAGGPE |
| | additional aa at N-terminus | VTYEPPPTAPT |
| 443 | Hybrid hu-ActRIIB-ECD | GEAETRECIYYNANWELERTNQSGLERCEGEQDKRLHCYASWRNSSGTIEL |
| | (SEQ ID NO: 12) with 3 | VKKGCWLDDFNCYDRTDCVEKKDSPEVYFCCCEGNMCNERFTHLPEAGGP |
| | additional aa at N-terminus | EVTYEPPPTAPT |
| 444 | Hybrid hu-ActRIIB-ECD | RGEAETRECIYYNANWELERTNQSGLERCEGEQDKRLHCYASWRNSSGTIE |
| | (SEQ ID NO: 12) with 4 | LVKKGCWLDDFNCYDRTDCVEKKDSPEVYFCCCEGNMCNERFTHLPEAGG |
| | additional aa at N-terminus | PEVTYEPPPTAPT |
| 445 | Hybrid hu-ActRIIB-ECD | GRGEAETRECIYYNANWELERTNQSGLERCEGEQDKRLHCYASWRNSSGTI |
| | (SEQ ID NO: 12) with 5 | ELVKKGCWLDDFNCYDRTDCVEKKDSPEVYFCCCEGNMCNERFTHLPEAG |
| | additional aa at N-terminus | GPEVTYEPPPTAPT |
| 446 | Hybrid hu-ActRIIB-ECD | SGRGEAETRECIYYNANWELERTNQSGLERCEGEQDKRLHCYASWRNSSGT |
| | (SEQ ID NO: 12) with 6 | IELVKKGCWLDDFNCYDRTDCVEKKDSPEVYFCCCEGNMCNERFTHLPEAG |
| | additional aa at N-terminus | GPEVTYEPPPTAPT |
| 447 | Hybrid hu-ActRIIB-ECD | AETRECIYYNANWELERTNQSGLERCEGDQDKRLHCYASWRNSSGTIELVK |
| | (SEQ ID NO: 13) with 1 | KGCWLDDFNCYDRQECVEKKDSPEVYFCCCEGNMCNERFTHLPEAGGPEV |
| | additional aa at N-terminus | TYEPPPTAPT |
| 448 | Hybrid hu-ActRIIB-ECD | EAETRECIYYNANWELERTNQSGLERCEGDQDKRLHCYASWRNSSGTIELV |
| | (SEQ ID NO: 13) with 2 | KKGCWLDDFNCYDRQECVEKKDSPEVYFCCCEGNMCNERFTHLPEAGGPE |
| | additional aa at N-terminus | VTYEPPPTAPT |
| 449 | Hybrid hu-ActRIIB-ECD | GEAETRECIYYNANWELERTNQSGLERCEGDQDKRLHCYASWRNSSGTIEL |
| | (SEQ ID NO: 13) with 3 | VKKGCWLDDFNCYDRQECVEKKDSPEVYFCCCEGNMCNERFTHLPEAGGP |
| | additional aa at N-terminus | EVTYEPPPTAPT |
| 450 | Hybrid hu-ActRIIB-ECD | RGEAETRECIYYNANWELERTNQSGLERCEGDQDKRLHCYASWRNSSGTIE |
| | (SEQ ID NO: 13) with 4 | LVKKGCWLDDFNCYDRQECVEKKDSPEVYFCCCEGNMCNERFTHLPEAGG |
| | additional aa at N-terminus | PEVTYEPPPTAPT |
| 451 | Hybrid hu-ActRIIB-ECD | GRGEAETRECIYYNANWELERTNQSGLERCEGDQDKRLHCYASWRNSSGTI |
| | (SEQ ID NO: 13) with 5 | ELVKKGCWLDDFNCYDRQECVEKKDSPEVYFCCCEGNMCNERFTHLPEAG |
| | additional aa at N-terminus | GPEVTYEPPPTAPT |
| 452 | Hybrid hu-ActRIIB-ECD | SGRGEAETRECIYYNANWELERTNQSGLERCEGDQDKRLHCYASWRNSSGT |
| | (SEQ ID NO: 13) with 6 | IELVKKGCWLDDFNCYDRQECVEKKDSPEVYFCCCEGNMCNERFTHLPEAG |
| | additional aa at N-terminus | GPEVTYEPPPTAPT |
| 453 | Hybrid hu-ActRIIB-ECD | AETQECIYYNANWEKDRTNQTGVEPCYGDKDKRRHCYASWRNSSGTIELV |
| | (SEQ ID NO: 14) with 1 | KKGCWLDDFNCYDRQECVATEENPQVYFCCCEGNFCNERFTHLPEAGGPEV |
| | additional aa at N-terminus | TYEPPPTAPT |
| 454 | Hybrid hu-ActRIIB-ECD | EAETQECIYYNANWEKDRTNQTGVEPCYGDKDKRRHCYASWRNSSGTIELV |
| | (SEQ ID NO: 14) with 2 | KKGCWLDDFNCYDRQECVATEENPQVYFCCCEGNFCNERFTHLPEAGGPEV |
| | additional aa at N-terminus | TYEPPPTAPT |
| 455 | Hybrid hu-ActRIIB-ECD | GEAETQECIYYNANWEKDRTNQTGVEPCYGDKDKRRHCYASWRNSSGTIEL |
| | (SEQ ID NO: 14) with 3 | VKKGCWLDDFNCYDRQECVATEENPQVYFCCCEGNFCNERFTHLPEAGGPE |
| | additional aa at N-terminus | VTYEPPPTAPT |
| 456 | Hybrid hu-ActRIIB-ECD | RGEAETQECIYYNANWEKDRTNQTGVEPCYGDKDKRRHCYASWRNSSGTI |
| | (SEQ ID NO: 14) with 4 | ELVKKGCWLDDFNCYDRQECVATEENPQVYFCCCEGNFCNERFTHLPEAGG |
| | additional aa at N-terminus | PEVTYEPPPTAPT |
| 457 | Hybrid hu-ActRIIB-ECD | GRGEAETQECIYYNANWEKDRTNQTGVEPCYGDKDKRRHCYASWRNSSGT |
| | (SEQ ID NO: 14) with 5 | IELVKKGCWLDDFNCYDRQECVATEENPQVYFCCCEGNFCNERFTHLPEAG |
| | additional aa at N-terminus | GPEVTYEPPPTAPT |
| 458 | Hybrid hu-ActRIIB-ECD | SGRGEAETQECIYYNANWEKDRTNQTGVEPCYGDKDKRRHCYASWRNSSG |
| | (SEQ ID NO: 14) with 6 | TIELVKKGCWLDDFNCYDRQECVATEENPQVYFCCCEGNFCNERFTHLPEA |
| | additional aa at N-terminus | GGPEVTYEPPPTAPT |
| 459 | Hybrid hu-ActRIIB-ECD | AETQECIYYNANWEKDRTNQTGVEPCEGDQDKRLHCYASWRNSSGTIELVK |
| | (SEQ ID NO: 15) with 1 | KGCWLDDFNCYDRQECVATEENPQVYFCCCEGNFCNERFTHLPEAGGPEVT |
| | additional aa at N-terminus | YEPPPTAPT |
| 460 | Hybrid hu-ActRIIB-ECD | EAETQECIYYNANWEKDRTNQTGVEPCEGDQDKRLHCYASWRNSSGTIELV |
| | (SEQ ID NO: 15) with 2 | KKGCWLDDFNCYDRQECVATEENPQVYFCCCEGNFCNERFTHLPEAGGPEV |
| | additional aa at N-terminus | TYEPPPTAPT |
| 461 | Hybrid hu-ActRIIB-ECD | GEAETQECIYYNANWEKDRTNQTGVEPCEGDQDKRLHCYASWRNSSGTIEL |
| | (SEQ ID NO: 15) with 3 | VKKGCWLDDFNCYDRQECVATEENPQVYFCCCEGNFCNERFTHLPEAGGPE |
| | additional aa at N-terminus | VTYEPPPTAPT |
| 462 | Hybrid hu-ActRIIB-ECD | RGEAETQECIYYNANWEKDRTNQTGVEPCEGDQDKRLHCYASWRNSSGTIE |
| | (SEQ ID NO: 15) with 4 | LVKKGCWLDDFNCYDRQECVATEENPQVYFCCCEGNFCNERFTHLPEAGGP |
| | additional aa at N-terminus | EVTYEPPPTAPT |
| 463 | Hybrid hu-ActRIIB-ECD | GRGEAETQECIYYNANWEKDRTNQTGVEPCEGDQDKRLHCYASWRNSSGTI |
| | (SEQ ID NO: 15) with 5 | ELVKKGCWLDDFNCYDRQECVATEENPQVYFCCCEGNFCNERFTHLPEAGG |
| | additional aa at N-terminus | PEVTYEPPPTAPT |
| 464 | Hybrid hu-ActRIIB-ECD | SGRGEAETQECIYYNANWEKDRTNQTGVEPCEGDQDKRLHCYASWRNSSG |
| | (SEQ ID NO: 15) with 6 | TIELVKKGCWLDDFNCYDRQECVATEENPQVYFCCCEGNFCNERFTHLPEA |
| | additional aa at N-terminus | GGPEVTYEPPPTAPT |
| 465 | Hybrid hu-ActRIIB-ECD | AETRECIYYNANWELERTNQSGLERCYGDKDKRRHCYASWRNSSGTIELVK |
| | (SEQ ID NO: 16) with 1 | KGCWLDDFNCYDRQECVATEENPQVYFCCCEGNFCNERFTHLPEAGGPEVT |
| | additional aa at N-terminus | YEPPPTAPT |
| 466 | Hybrid hu-ActRIIB-ECD | EAETRECIYYNANWELERTNQSGLERCYGDKDKRRHCYASWRNSSGTIELV |
| | (SEQ ID NO: 16) with 2 | KKGCWLDDFNCYDRQECVATEENPQVYFCCCEGNFCNERFTHLPEAGGPEV |
| | additional aa at N-terminus | TYEPPPTAPT |
| 467 | Hybrid hu-ActRIIB-ECD | GEAETRECIYYNANWELERTNQSGLERCYGDKDKRRHCYASWRNSSGTIEL |
| | (SEQ ID NO: 16) with 3 | VKKGCWLDDFNCYDRQECVATEENPQVYFCCCEGNFCNERFTHLPEAGGPE |
| | additional aa at N-terminus | VTYEPPPTAPT |
| 468 | Hybrid hu-ActRIIB-ECD | RGEAETRECIYYNANWELERTNQSGLERCYGDKDKRRHCYASWRNSSGTIE |
| | (SEQ ID NO: 16) with 4 | LVKKGCWLDDFNCYDRQECVATEENPQVYFCCCEGNFCNERFTHLPEAGGP |
| | additional aa at N-terminus | EVTYEPPPTAPT |
| 469 | Hybrid hu-ActRIIB-ECD | GRGEAETRECIYYNANWELERTNQSGLERCYGDKDKRRHCYASWRNSSGTI |
| | (SEQ ID NO: 16) with 5 | ELVKKGCWLDDFNCYDRQECVATEENPQVYFCCCEGNFCNERFTHLPEAGG |
| | additional aa at N-terminus | PEVTYEPPPTAPT |
| 470 | Hybrid hu-ActRIIB-ECD | SGRGEAETRECIYYNANWELERTNQSGLERCYGDKDKRRHCYASWRNSSG |
| | (SEQ ID NO: 16) with 6 | TIELVKKGCWLDDFNCYDRQECVATEENPQVYFCCCEGNFCNERFTHLPEA |
| | additional aa at N-terminus | GGPEVTYEPPPTAPT |
| 471 | Hybrid hu-ActRIIB-ECD | AETRECIYYNANWEKDRTNQTGVEPCEGDQDKRLHCYASWRNSSGTIELVK |
| | (SEQ ID NO: 17) with 1 | KGCWLDDFNCYDRQECVATEENPQVYFCCCEGNFCNERFTHLPEAGGPEVT |
| | additional aa at N-terminus | YEPPPTAPT |
| 472 | Hybrid hu-ActRIIB-ECD | EAETRECIYYNANWEKDRTNQTGVEPCEGDQDKRLHCYASWRNSSGTIELV |
| | (SEQ ID NO: 17) with 2 | KKGCWLDDFNCYDRQECVATEENPQVYFCCCEGNFCNERFTHLPEAGGPEV |
| | additional aa at N-terminus | TYEPPPTAPT |
| 473 | Hybrid hu-ActRIIB-ECD | GEAETRECIYYNANWEKDRTNQTGVEPCEGDQDKRLHCYASWRNSSGTIEL |
| | (SEQ ID NO: 17) with 3 | VKKGCWLDDFNCYDRQECVATEENPQVYFCCCEGNFCNERFTHLPEAGGPE |
| | additional aa at N-terminus | VTYEPPPTAPT |
| 474 | Hybrid hu-ActRIIB-ECD | RGEAETRECIYYNANWEKDRTNQTGVEPCEGDQDKRLHCYASWRNSSGTIE |
| | (SEQ ID NO: 17) with 4 | LVKKGCWLDDFNCYDRQECVATEENPQVYFCCCEGNFCNERFTHLPEAGGP |
| | additional aa at N-terminus | EVTYEPPPTAPT |
| 475 | Hybrid hu-ActRIIB-ECD | GRGEAETRECIYYNANWEKDRTNQTGVEPCEGDQDKRLHCYASWRNSSGTI |
| | (SEQ ID NO: 17) with 5 | ELVKKGCWLDDFNCYDRQECVATEENPQVYFCCCEGNFCNERFTHLPEAGG |
| | additional aa at N-terminus | PEVTYEPPPTAPT |
| 476 | Hybrid hu-ActRIIB-ECD | SGRGEAETRECIYYNANWEKDRTNQTGVEPCEGDQDKRLHCYASWRNSSG |
| | (SEQ ID NO: 17) with 6 | TIELVKKGCWLDDFNCYDRQECVATEENPQVYFCCCEGNFCNERFTHLPEA |
| | additional aa at N-terminus | GGPEVTYEPPPTAPT |
| 477 | Hybrid hu-ActRIIB-ECD | AETQECIYYNANWEKDRTNQTGVEPCEGDQDKRLHCYASWRNSSGTIELVK |
| | (SEQ ID NO: 18) with 1 | KGCWLDDFNCYDRQECVATEENPQVYFCCCEGNFCNERFTHLPEAGGPEVT |
| | additional aa at N-terminus | YEPPPTAPT |
| 478 | Hybrid hu-ActRIIB-ECD | EAETQECIYYNANWEKDRTNQTGVEPCEGDQDKRLHCYASWRNSSGTIELV |
| | (SEQ ID NO: 18) with 2 | KKGCWLDDFNCYDRQECVATEENPQVYFCCCEGNFCNERFTHLPEAGGPEV |
| | additional aa at N-terminus | TYEPPPTAPT |
| 479 | Hybrid hu-ActRIIB-ECD | GEAETQECIYYNANWEKDRTNQTGVEPCEGDQDKRLHCYASWRNSSGTIEL |
| | (SEQ ID NO: 18) with 3 | VKKGCWLDDFNCYDRQECVATEENPQVYFCCCEGNFCNERFTHLPEAGGPE |
| | additional aa at N-terminus | VTYEPPPTAPT |
| 480 | Hybrid hu-ActRIIB-ECD | RGEAETQECIYYNANWEKDRTNQTGVEPCEGDQDKRLHCYASWRNSSGTIE |
| | (SEQ ID NO: 18) with 4 | LVKKGCWLDDFNCYDRQECVATEENPQVYFCCCEGNFCNERFTHLPEAGGP |
| | additional aa at N-terminus | EVTYEPPPTAPT |
| 481 | Hybrid hu-ActRIIB-ECD | GRGEAETQECIYYNANWEKDRTNQTGVEPCEGDQDKRLHCYASWRNSSGTI |
| | (SEQ ID NO: 18) with 5 | ELVKKGCWLDDFNCYDRQECVATEENPQVYFCCCEGNFCNERFTHLPEAGG |
| | additional aa at N-terminus | PEVTYEPPPTAPT |
| 482 | Hybrid hu-ActRIIB-ECD | SGRGEAETQECIYYNANWEKDRTNQTGVEPCEGDQDKRLHCYASWRNSSG |
| | (SEQ ID NO: 18) with 6 | TIELVKKGCWLDDFNCYDRQECVATEENPQVYFCCCEGNFCNERFTHLPEA |
| | additional aa at N-terminus | GGPEVTYEPPPTAPT |
| 483 | Hybrid hu-ActRIIB-ECD | AETQECIYYNANWEKDRTNQTGLERCEGEQDKRLHCYASWRNSSGTIELVK |
| | (SEQ ID NO: 19) with 1 | KGCWLDDFNCYDRQECVATEENPQVYFCCCEGNFCNERFTHLPEAGGPEVT |
| | additional aa at N-terminus | YEPPPTAPT |
| 484 | Hybrid hu-ActRIIB-ECD | EAETQECIYYNANWEKDRTNQTGLERCEGEQDKRLHCYASWRNSSGTIELV |
| | (SEQ ID NO: 19) with 2 | KKGCWLDDFNCYDRQECVATEENPQVYFCCCEGNFCNERFTHLPEAGGPEV |
| | additional aa at N-terminus | TYEPPPTAPT |
| 485 | Hybrid hu-ActRIIB-ECD | GEAETQECIYYNANWEKDRTNQTGLERCEGEQDKRLHCYASWRNSSGTIEL |
| | (SEQ ID NO: 19) with 3 | VKKGCWLDDFNCYDRQECVATEENPQVYFCCCEGNFCNERFTHLPEAGGPE |
| | additional aa at N-terminus | VTYEPPPTAPT |
| 486 | Hybrid hu-ActRIIB-ECD | RGEAETQECIYYNANWEKDRTNQTGLERCEGEQDKRLHCYASWRNSSGTIE |
| | (SEQ ID NO: 19) with 4 | LVKKGCWLDDFNCYDRQECVATEENPQVYFCCCEGNFCNERFTHLPEAGGP |
| | additional aa at N-terminus | EVTYEPPPTAPT |
| 487 | Hybrid hu-ActRIIB-ECD | GRGEAETQECIYYNANWEKDRTNQTGLERCEGEQDKRLHCYASWRNSSGTI |
| | (SEQ ID NO: 19) with 5 | ELVKKGCWLDDFNCYDRQECVATEENPQVYFCCCEGNFCNERFTHLPEAGG |
| | additional aa at N-terminus | PEVTYEPPPTAPT |
| 488 | Hybrid hu-ActRIIB-ECD | SGRGEAETQECIYYNANWEKDRTNQTGLERCEGEQDKRLHCYASWRNSSG |
| | (SEQ ID NO: 19) with 6 | TIELVKKGCWLDDFNCYDRQECVATEENPQVYFCCCEGNFCNERFTHLPEA |
| | additional aa at N-terminus | GGPEVTYEPPPTAPT |
| 489 | Hybrid hu-ActRIIB-ECD | AETQECIYYNANWEKDRTNQSGLERCEGEQDKRLHCYASWRNSSGTIELVK |
| | (SEQ ID NO: 20) with 1 | KGCWLDDFNCYDRQECVATEENPQVYFCCCEGNFCNERFTHLPEAGGPEVT |
| | additional aa at N-terminus | YEPPPTAPT |
| 490 | Hybrid hu-ActRIIB-ECD | EAETQECIYYNANWEKDRTNQSGLERCEGEQDKRLHCYASWRNSSGTIELV |
| | (SEQ ID NO: 20) with 2 | KKGCWLDDFNCYDRQECVATEENPQVYFCCCEGNFCNERFTHLPEAGGPEV |
| | additional aa at N-terminus | TYEPPPTAPT |
| 491 | Hybrid hu-ActRIIB-ECD | GEAETQECIYYNANWEKDRTNQSGLERCEGEQDKRLHCYASWRNSSGTIEL |
| | (SEQ ID NO: 20) with 3 | VKKGCWLDDFNCYDRQECVATEENPQVYFCCCEGNFCNERFTHLPEAGGPE |
| | additional aa at N-terminus | VTYEPPPTAPT |
| 492 | Hybrid hu-ActRIIB-ECD | RGEAETQECIYYNANWEKDRTNQSGLERCEGEQDKRLHCYASWRNSSGTIE |
| | (SEQ ID NO: 20) with 4 | LVKKGCWLDDFNCYDRQECVATEENPQVYFCCCEGNFCNERFTHLPEAGGP |
| | additional aa at N-terminus | EVTYEPPPTAPT |
| 493 | Hybrid hu-ActRIIB-ECD | GRGEAETQECIYYNANWEKDRTNQSGLERCEGEQDKRLHCYASWRNSSGTI |
| | (SEQ ID NO: 20) with 5 | ELVKKGCWLDDFNCYDRQECVATEENPQVYFCCCEGNFCNERFTHLPEAGG |
| | additional aa at N-terminus | PEVTYEPPPTAPT |
| 494 | Hybrid hu-ActRIIB-ECD | SGRGEAETQECIYYNANWEKDRTNQSGLERCEGEQDKRLHCYASWRNSSG |
| | (SEQ ID NO: 20) with 6 | TIELVKKGCWLDDFNCYDRQECVATEENPQVYFCCCEGNFCNERFTHLPEA |
| | additional aa at N-terminus | GGPEVTYEPPPTAPT |
| 495 | Hybrid hu-ActRIIB-ECD | AETRECIYYNANWEKDRTNQSGLERCEGEQDKRLHCYASWRNSSGTIELVK |
| | (SEQ ID NO: 21) with 1 | KGCWLDDFNCYDRQECVATEENPQVYFCCCEGNFCNERFTHLPEAGGPEVT |
| | additional aa at N-terminus | YEPPPTAPT |
| 496 | Hybrid hu-ActRIIB-ECD | EAETRECIYYNANWEKDRTNQSGLERCEGEQDKRLHCYASWRNSSGTIELV |
| | (SEQ ID NO: 21) with 2 | KKGCWLDDFNCYDRQECVATEENPQVYFCCCEGNFCNERFTHLPEAGGPEV |
| | additional aa at N-terminus | TYEPPPTAPT |
| 497 | Hybrid hu-ActRIIB-ECD | GEAETRECIYYNANWEKDRTNQSGLERCEGEQDKRLHCYASWRNSSGTIEL |
| | (SEQ ID NO: 21) with 3 | VKKGCWLDDFNCYDRQECVATEENPQVYFCCCEGNFCNERFTHLPEAGGPE |
| | additional aa at N-terminus | VTYEPPPTAPT |
| 498 | Hybrid hu-ActRIIB-ECD | RGEAETRECIYYNANWEKDRTNQSGLERCEGEQDKRLHCYASWRNSSGTIE |
| | (SEQ ID NO: 21) with 4 | LVKKGCWLDDFNCYDRQECVATEENPQVYFCCCEGNFCNERFTHLPEAGGP |
| | additional aa at N-terminus | EVTYEPPPTAPT |
| 499 | Hybrid hu-ActRIIB-ECD | GRGEAETRECIYYNANWEKDRTNQSGLERCEGEQDKRLHCYASWRNSSGTI |
| | (SEQ ID NO: 21) with 5 | ELVKKGCWLDDFNCYDRQECVATEENPQVYFCCCEGNFCNERFTHLPEAGG |
| | additional aa at N-terminus | PEVTYEPPPTAPT |
| 500 | Hybrid hu-ActRIIB-ECD | SGRGEAETRECIYYNANWEKDRTNQSGLERCEGEQDKRLHCYASWRNSSGT |
| | (SEQ ID NO: 21) with 6 | IELVKKGCWLDDFNCYDRQECVATEENPQVYFCCCEGNFCNERFTHLPEAG |
| | additional aa at N-terminus | GPEVTYEPPPTAPT |
| 501 | Hybrid hu-ActRIIB-ECD | AETQECIYYNANWELERTNQSGLERCEGEQDKRLHCYASWRNSSGTIELVK |
| | (SEQ ID NO: 22) with 1 | KGCWLDDFNCYDRQECVATEENPQVYFCCCEGNFCNERFTHLPEAGGPEVT |
| | additional aa at N-terminus | YEPPPTAPT |
| 502 | Hybrid hu-ActRIIB-ECD | EAETQECIYYNANWELERTNQSGLERCEGEQDKRLHCYASWRNSSGTIELV |
| | (SEQ ID NO: 22) with 2 | KKGCWLDDFNCYDRQECVATEENPQVYFCCCEGNFCNERFTHLPEAGGPEV |
| | additional aa at N-terminus | TYEPPPTAPT |
| 503 | Hybrid hu-ActRIIB-ECD | GEAETQECIYYNANWELERTNQSGLERCEGEQDKRLHCYASWRNSSGTIEL |
| | (SEQ ID NO: 22) with 3 | VKKGCWLDDFNCYDRQECVATEENPQVYFCCCEGNFCNERFTHLPEAGGPE |
| | additional aa at N-terminus | VTYEPPPTAPT |
| 504 | Hybrid hu-ActRIIB-ECD | RGEAETQECIYYNANWELERTNQSGLERCEGEQDKRLHCYASWRNSSGTIE |
| | (SEQ ID NO: 22) with 4 | LVKKGCWLDDFNCYDRQECVATEENPQVYFCCCEGNFCNERFTHLPEAGGP |
| | additional aa at N-terminus | EVTYEPPPTAPT |
| 505 | Hybrid hu-ActRIIB-ECD | GRGEAETQECIYYNANWELERTNQSGLERCEGEQDKRLHCYASWRNSSGTI |
| | (SEQ ID NO: 22) with 5 | ELVKKGCWLDDFNCYDRQECVATEENPQVYFCCCEGNFCNERFTHLPEAGG |
| | additional aa at N-terminus | PEVTYEPPPTAPT |
| 506 | Hybrid hu-ActRIIB-ECD | SGRGEAETQECIYYNANWELERTNQSGLERCEGEQDKRLHCYASWRNSSGT |
| | (SEQ ID NO: 22) with 6 | IELVKKGCWLDDFNCYDRQECVATEENPQVYFCCCEGNFCNERFTHLPEAG |
| | additional aa at N-terminus | GPEVTYEPPPTAPT |
| 507 | Hybrid hu-ActRIIB-ECD | AETRECIYYNANWELERTNQSGLERCEGEQDKRLHCFATWRNSSGTIELVK |
| | (SEQ ID NO: 23) with 1 | QGCWLDDFNCYDRQECVATEENPQVYFCCCEGNFCNERFTHLPEAGGPEVT |
| | additional aa at N-terminus | YEPPPTAPT |
| 508 | Hybrid hu-ActRIIB-ECD | EAETRECIYYNANWELERTNQSGLERCEGEQDKRLHCFATWRNSSGTIELVK |
| | (SEQ ID NO: 23) with 2 | QGCWLDDFNCYDRQECVATEENPQVYFCCCEGNFCNERFTHLPEAGGPEVT |
| | additional aa at N-terminus | YEPPPTAPT |
| 509 | Hybrid hu-ActRIIB-ECD | GEAETRECIYYNANWELERTNQSGLERCEGEQDKRLHCFATWRNSSGTIELV |
| | (SEQ ID NO: 23) with 3 | KQGCWLDDFNCYDRQECVATEENPQVYFCCCEGNFCNERFTHLPEAGGPEV |
| | additional aa at N-terminus | TYEPPPTAPT |
| 510 | Hybrid hu-ActRIIB-ECD | RGEAETRECIYYNANWELERTNQSGLERCEGEQDKRLHCFATWRNSSGTIEL |
| | (SEQ ID NO: 23) with 4 | VKQGCWLDDFNCYDRQECVATEENPQVYFCCCEGNFCNERFTHLPEAGGPE |
| | additional aa at N-terminus | VTYEPPPTAPT |
| 511 | Hybrid hu-ActRIIB-ECD | GRGEAETRECIYYNANWELERTNQSGLERCEGEQDKRLHCFATWRNSSGTI |
| | (SEQ ID NO: 23) with 5 | ELVKQGCWLDDFNCYDRQECVATEENPQVYFCCCEGNFCNERFTHLPEAGG |
| | additional aa at N-terminus | PEVTYEPPPTAPT |
| 512 | Hybrid hu-ActRIIB-ECD | SGRGEAETRECIYYNANWELERTNQSGLERCEGEQDKRLHCFATWRNSSGTI |
| | (SEQ ID NO: 23) with 6 | ELVKQGCWLDDFNCYDRQECVATEENPQVYFCCCEGNFCNERFTHLPEAGG |
| | additional aa at N-terminus | PEVTYEPPPTAPT |
| 513 | Hybrid hu-ActRIIB-ECD | AETRECIYYNANWELERTNQSGLERCYGDKDKRRHCYASWRNSSGTIELVK |
| | (SEQ ID NO: 24) with 1 | KGCWLDDINCYDRQECVATEENPQVYFCCCEGNFCNERFTHLPEAGGPEVT |
| | additional aa at N-terminus | YEPPPTAPT |
| 514 | Hybrid hu-ActRIIB-ECD | EAETRECIYYNANWELERTNQSGLERCYGDKDKRRHCYASWRNSSGTIELV |
| | (SEQ ID NO: 24) with 2 | KKGCWLDDINCYDRQECVATEENPQVYFCCCEGNFCNERFTHLPEAGGPEV |
| | additional aa at N-terminus | TYEPPPTAPT |
| 515 | Hybrid hu-ActRIIB-ECD | GEAETRECIYYNANWELERTNQSGLERCYGDKDKRRHCYASWRNSSGTIEL |
| | (SEQ ID NO: 24) with 3 | VKKGCWLDDINCYDRQECVATEENPQVYFCCCEGNFCNERFTHLPEAGGPE |
| | additional aa at N-terminus | VTYEPPPTAPT |
| 516 | Hybrid hu-ActRIIB-ECD | RGEAETRECIYYNANWELERTNQSGLERCYGDKDKRRHCYASWRNSSGTIE |
| | (SEQ ID NO: 24) with 4 | LVKKGCWLDDINCYDRQECVATEENPQVYFCCCEGNFCNERFTHLPEAGGP |
| | additional aa at N-terminus | EVTYEPPPTAPT |
| 517 | Hybrid hu-ActRIIB-ECD | GRGEAETRECIYYNANWELERTNOSGLERCYGDKDKRRHCYASWRNSSGTI |
| | (SEQ ID NO: 24) with 5 | ELVKKGCWLDDINCYDRQECVATEENPQVYFCCCEGNFCNERFTHLPEAGG |
| | additional aa at N-terminus | PEVTYEPPPTAPT |
| 518 | Hybrid hu-ActRIIB-ECD | SGRGEAETRECIYYNANWELERTNQSGLERCYGDKDKRRHCYASWRNSSG |
| | (SEQ ID NO: 24) with 6 | TIELVKKGCWLDDINCYDRQECVATEENPQVYFCCCEGNFCNERFTHLPEAG |
| | additional aa at N-terminus | GPEVTYEPPPTAPT |
| 519 | Hybrid hu-ActRIIB-ECD | AETRECIYYNANWELERTNQSGLERCEGEQDKRLHCYASWRNSSGTIELVK |
| | (SEQ ID NO: 25) with 1 | KGCWLDDFNCYDRQECVATKENPQVYFCCCEGNFCNERFTHLPEAGGPEVT |
| | additional aa at N-terminus | YEPPPTAPT |
| 520 | Hybrid hu-ActRIIB-ECD | EAETRECIYYNANWELERTNQSGLERCEGEQDKRLHCYASWRNSSGTIELV |
| | (SEQ ID NO: 25) with 2 | KKGCWLDDFNCYDRQECVATKENPQVYFCCCEGNFCNERFTHLPEAGGPE |
| | additional aa at N-terminus | VTYEPPPTAPT |
| 521 | Hybrid hu-ActRIIB-ECD | GEAETRECIYYNANWELERTNQSGLERCEGEQDKRLHCYASWRNSSGTIEL |
| | (SEQ ID NO: 25) with 3 | VKKGCWLDDFNCYDRQECVATKENPQVYFCCCEGNFCNERFTHLPEAGGP |
| | additional aa at N-terminus | EVTYEPPPTAPT |
| 522 | Hybrid hu-ActRIIB-ECD | RGEAETRECIYYNANWELERTNQSGLERCEGEQDKRLHCYASWRNSSGTIE |
| | (SEQ ID NO: 25) with 4 | LVKKGCWLDDFNCYDRQECVATKENPQVYFCCCEGNFCNERFTHLPEAGG |
| | additional aa at N-terminus | PEVTYEPPPTAPT |
| 523 | Hybrid hu-ActRIIB-ECD | GRGEAETRECIYYNANWELERTNQSGLERCEGEQDKRLHCYASWRNSSGTI |
| | (SEQ ID NO: 25) with 5 | ELVKKGCWLDDFNCYDRQECVATKENPQVYFCCCEGNFCNERFTHLPEAG |
| | additional aa at N-terminus | GPEVTYEPPPTAPT |
| 524 | Hybrid hu-ActRIIB-ECD | SGRGEAETRECIYYNANWELERTNQSGLERCEGEQDKRLHCYASWRNSSGT |
| | (SEQ ID NO: 25) with 6 | IELVKKGCWLDDFNCYDRQECVATKENPQVYFCCCEGNFCNERFTHLPEAG |
| | additional aa at N-terminus | GPEVTYEPPPTAPT |
| 525 | Hybrid hu-ActRIIB-ECD | AETRECIYYNANWELERTNQSGLERCEGEQDKRLHCYASWRNSSGTIELVK |
| | (SEQ ID NO: 26) with 1 | KGCWLDDINCYDRQECVATEENPQVYFCCCEGNFCNERFTHLPEAGGPEVT |
| | additional aa at N-terminus | YEPPPTAPT |
| 526 | Hybrid hu-ActRIIB-ECD | EAETRECIYYNANWELERTNQSGLERCEGEQDKRLHCYASWRNSSGTIELV |
| | (SEQ ID NO: 26) with 2 | KKGCWLDDINCYDRQECVATEENPQVYFCCCEGNFCNERFTHLPEAGGPEV |
| | additional aa at N-terminus | TYEPPPTAPT |
| 527 | Hybrid hu-ActRIIB-ECD | GEAETRECIYYNANWELERTNQSGLERCEGEQDKRLHCYASWRNSSGTIEL |
| | (SEQ ID NO: 26) with 3 | VKKGCWLDDINCYDRQECVATEENPQVYFCCCEGNFCNERFTHLPEAGGPE |
| | additional aa at N-terminus | VTYEPPPTAPT |
| 528 | Hybrid hu-ActRIIB-ECD | RGEAETRECIYYNANWELERTNQSGLERCEGEQDKRLHCYASWRNSSGTIE |
| | (SEQ ID NO: 26) with 4 | LVKKGCWLDDINCYDRQECVATEENPQVYFCCCEGNFCNERFTHLPEAGGP |
| | additional aa at N-terminus | EVTYEPPPTAPT |
| 529 | Hybrid hu-ActRIIB-ECD | GRGEAETRECIYYNANWELERTNQSGLERCEGEQDKRLHCYASWRNSSGTI |
| | (SEQ ID NO: 26) with 5 | ELVKKGCWLDDINCYDRQECVATEENPQVYFCCCEGNFCNERFTHLPEAGG |
| | additional aa at N-terminus | PEVTYEPPPTAPT |
| 530 | Hybrid hu-ActRIIB-ECD | SGRGEAETRECIYYNANWELERTNQSGLERCEGEQDKRLHCYASWRNSSGT |
| | (SEQ ID NO: 26) with 6 | IELVKKGCWLDDINCYDRQECVATEENPQVYFCCCEGNFCNERFTHLPEAG |
| | additional aa at N-terminus | GPEVTYEPPPTAPT |
| 531 | Hybrid hu-ActRIIB-ECD | AETRECIYYNANWELERTNQSGLERCEGEQDKRLHCYASWRNSSGTIELVK |
| | (SEQ ID NO: 27) with 1 | KGCWLDDINCYDRQECVATKENPQVYFCCCEGNFCNERFTHLPEAGGPEVT |
| | additional aa at N-terminus | YEPPPTAPT |
| 532 | Hybrid hu-ActRIIB-ECD | EAETRECIYYNANWELERTNQSGLERCEGEQDKRLHCYASWRNSSGTIELV |
| | (SEQ ID NO: 27) with 2 | KKGCWLDDINCYDRQECVATKENPQVYFCCCEGNFCNERFTHLPEAGGPEV |
| | additional aa at N-terminus | TYEPPPTAPT |
| 533 | Hybrid hu-ActRIIB-ECD | GEAETRECIYYNANWELERTNQSGLERCEGEQDKRLHCYASWRNSSGTIEL |
| | (SEQ ID NO: 27) with 3 | VKKGCWLDDINCYDRQECVATKENPQVYFCCCEGNFCNERFTHLPEAGGPE |
| | additional aa at N-terminus | VTYEPPPTAPT |
| 534 | Hybrid hu-ActRIIB-ECD | RGEAETRECIYYNANWELERTNQSGLERCEGEQDKRLHCYASWRNSSGTIE |
| | (SEQ ID NO: 27) with 4 | LVKKGCWLDDINCYDRQECVATKENPQVYFCCCEGNFCNERFTHLPEAGGP |
| | additional aa at N-terminus | EVTYEPPPTAPT |
| 535 | Hybrid hu-ActRIIB-ECD | GRGEAETRECIYYNANWELERTNQSGLERCEGEQDKRLHCYASWRNSSGTI |
| | (SEQ ID NO: 27) with 5 | ELVKKGCWLDDINCYDRQECVATKENPQVYFCCCEGNFCNERFTHLPEAGG |
| | additional aa at N-terminus | PEVTYEPPPTAPT |
| 536 | Hybrid hu-ActRIIB-ECD | SGRGEAETRECIYYNANWELERTNQSGLERCEGEQDKRLHCYASWRNSSGT |
| | (SEQ ID NO: 27) with 6 | IELVKKGCWLDDINCYDRQECVATKENPQVYFCCCEGNFCNERFTHLPEAG |
| | additional aa at N-terminus | GPEVTYEPPPTAPT |
| 537 | Hybrid hu-ActRIIB-ECD | AETRECIYYNANWELERTNQSGLERCEGDKDKRLHCYASWRNSSGTIELVK |
| | (SEQ ID NO: 28) with 1 | KGCWLDDINCYDRQECVATKENPQVYFCCCEGNFCNERFTHLPEAGGPEVT |
| | additional aa at N-terminus | YEPPPTAPT |
| 538 | Hybrid hu-ActRIIB-ECD | EAETRECIYYNANWELERTNQSGLERCEGDKDKRLHCYASWRNSSGTIELV |
| | (SEQ ID NO: 28) with 2 | KKGCWLDDINCYDRQECVATKENPQVYFCCCEGNFCNERFTHLPEAGGPEV |
| | additional aa at N-terminus | TYEPPPTAPT |
| 539 | Hybrid hu-ActRIIB-ECD | GEAETRECIYYNANWELERTNQSGLERCEGDKDKRLHCYASWRNSSGTIEL |
| | (SEQ ID NO: 28) with 3 | VKKGCWLDDINCYDRQECVATKENPQVYFCCCEGNFCNERFTHLPEAGGPE |
| | additional aa at N-terminus | VTYEPPPTAPT |
| 540 | Hybrid hu-ActRIIB-ECD | RGEAETRECIYYNANWELERTNQSGLERCEGDKDKRLHCYASWRNSSGTIE |
| | (SEQ ID NO: 28) with 4 | LVKKGCWLDDINCYDRQECVATKENPQVYFCCCEGNFCNERFTHLPEAGGP |
| | additional aa at N-terminus | EVTYEPPPTAPT |
| 541 | Hybrid hu-ActRIIB-ECD | GRGEAETRECIYYNANWELERTNQSGLERCEGDKDKRLHCYASWRNSSGTI |
| | (SEQ ID NO: 28) with 5 | ELVKKGCWLDDINCYDRQECVATKENPQVYFCCCEGNFCNERFTHLPEAGG |
| | additional aa at N-terminus | PEVTYEPPPTAPT |
| 542 | Hybrid hu-ActRIIB-ECD | SGRGEAETRECIYYNANWELERTNQSGLERCEGDKDKRLHCYASWRNSSGT |
| | (SEQ ID NO: 28) with 6 | IELVKKGCWLDDINCYDRQECVATKENPQVYFCCCEGNFCNERFTHLPEAG |
| | additional aa at N-terminus | GPEVTYEPPPTAPT |
| 543 | Hybrid hu-ActRIIB-ECD | AETRECIYYNANWELERTNQSGLERCEGDQDKRLHCYASWRNSSGTIELVK |
| | (SEQ ID NO: 29) with 1 | KGCWLDDINCYDRQECVATKENPQVYFCCCEGNFCNERFTHLPEAGGPEVT |
| | additional aa at N-terminus | YEPPPTAPT |
| 544 | Hybrid hu-ActRIIB-ECD | EAETRECIYYNANWELERTNQSGLERCEGDQDKRLHCYASWRNSSGTIELV |
| | (SEQ ID NO: 29) with 2 | KKGCWLDDINCYDRQECVATKENPQVYFCCCEGNFCNERFTHLPEAGGPEV |
| | additional aa at N-terminus | TYEPPPTAPT |
| 545 | Hybrid hu-ActRIIB-ECD | GEAETRECIYYNANWELERTNQSGLERCEGDQDKRLHCYASWRNSSGTIEL |
| | (SEQ ID NO: 29) with 3 | VKKGCWLDDINCYDRQECVATKENPQVYFCCCEGNFCNERFTHLPEAGGPE |
| | additional aa at N-terminus | VTYEPPPTAPT |
| 546 | Hybrid hu-ActRIIB-ECD | RGEAETRECIYYNANWELERTNQSGLERCEGDQDKRLHCYASWRNSSGTIE |
| | (SEQ ID NO: 29) with 4 | LVKKGCWLDDINCYDRQECVATKENPQVYFCCCEGNFCNERFTHLPEAGGP |
| | additional aa at N-terminus | EVTYEPPPTAPT |
| 547 | Hybrid hu-ActRIIB-ECD | GRGEAETRECIYYNANWELERTNQSGLERCEGDQDKRLHCYASWRNSSGTI |
| | (SEQ ID NO: 29) with 5 | ELVKKGCWLDDINCYDRQECVATKENPQVYFCCCEGNFCNERFTHLPEAGG |
| | additional aa at N-terminus | PEVTYEPPPTAPT |
| 548 | Hybrid hu-ActRIIB-ECD | SGRGEAETRECIYYNANWELERTNQSGLERCEGDQDKRLHCYASWRNSSGT |
| | (SEQ ID NO: 29) with 6 | IELVKKGCWLDDINCYDRQECVATKENPQVYFCCCEGNFCNERFTHLPEAG |
| | additional aa at N-terminus | GPEVTYEPPPTAPT |
| 549 | Hybrid hu-ActRIIB-ECD | AETRECIYYNANWELERTNQSGLERCEGDQDKRLHCYASWRNSSGTIELVK |
| | (SEQ ID NO: 30) with 1 | KGCWLDDFNCYDRQECVATKENPQVYFCCCEGNFCNERFTHLPEAGGPEVT |
| | additional aa at N-terminus | YEPPPTAPT |
| 550 | Hybrid hu-ActRIIB-ECD | EAETRECIYYNANWELERTNQSGLERCEGDQDKRLHCYASWRNSSGTIELV |
| | (SEQ ID NO: 30) with 2 | KKGCWLDDFNCYDRQECVATKENPQVYFCCCEGNFCNERFTHLPEAGGPE |
| | additional aa at N-terminus | VTYEPPPTAPT |
| 551 | Hybrid hu-ActRIIB-ECD | GEAETRECIYYNANWELERTNQSGLERCEGDQDKRLHCYASWRNSSGTIEL |
| | (SEQ ID NO: 30) with 3 | VKKGCWLDDFNCYDRQECVATKENPQVYFCCCEGNFCNERFTHLPEAGGP |
| | additional aa at N-terminus | EVTYEPPPTAPT |
| 552 | Hybrid hu-ActRIIB-ECD | RGEAETRECIYYNANWELERTNQSGLERCEGDQDKRLHCYASWRNSSGTIE |
| | (SEQ ID NO: 30) with 4 | LVKKGCWLDDFNCYDRQECVATKENPQVYFCCCEGNFCNERFTHLPEAGG |
| | additional aa at N-terminus | PEVTYEPPPTAPT |
| 553 | Hybrid hu-ActRIIB-ECD | GRGEAETRECIYYNANWELERTNQSGLERCEGDQDKRLHCYASWRNSSGTI |
| | (SEQ ID NO: 30) with 5 | ELVKKGCWLDDFNCYDRQECVATKENPQVYFCCCEGNFCNERFTHLPEAG |
| | additional aa at N-terminus | GPEVTYEPPPTAPT |
| 554 | Hybrid hu-ActRIIB-ECD | SGRGEAETRECIYYNANWELERTNQSGLERCEGDQDKRLHCYASWRNSSGT |
| | (SEQ ID NO: 30) with 6 | IELVKKGCWLDDFNCYDRQECVATKENPQVYFCCCEGNFCNERFTHLPEAG |
| | additional aa at N-terminus | GPEVTYEPPPTAPT |
| 555 | Hybrid hu-ActRIIB-ECD | AETRECIYYNANWELERTNQSGLERCEGDQDKRLHCYASWRNSSGTIELVK |
| | (SEQ ID NO: 31) with 1 | KGCWLDDFNCYDRQECVATEENPQVYFCCCEGNFCNERFTHLPEAGGPEVT |
| | additional aa at N-terminus | YEPPPTAPT |
| 556 | Hybrid hu-ActRIIB-ECD | EAETRECIYYNANWELERTNQSGLERCEGDQDKRLHCYASWRNSSGTIELV |
| | (SEQ ID NO: 31) with 2 | KKGCWLDDFNCYDRQECVATEENPQVYFCCCEGNFCNERFTHLPEAGGPEV |
| | additional aa at N-terminus | TYEPPPTAPT |
| 557 | Hybrid hu-ActRIIB-ECD | GEAETRECIYYNANWELERTNQSGLERCEGDQDKRLHCYASWRNSSGTIEL |
| | (SEQ ID NO: 31) with 3 | VKKGCWLDDFNCYDRQECVATEENPQVYFCCCEGNFCNERFTHLPEAGGPE |
| | additional aa at N-terminus | VTYEPPPTAPT |
| 558 | Hybrid hu-ActRIIB-ECD | RGEAETRECIYYNANWELERTNQSGLERCEGDQDKRLHCYASWRNSSGTIE |
| | (SEQ ID NO: 31) with 4 | LVKKGCWLDDFNCYDRQECVATEENPQVYFCCCEGNFCNERFTHLPEAGGP |
| | additional aa at N-terminus | EVTYEPPPTAPT |
| 559 | Hybrid hu-ActRIIB-ECD | GRGEAETRECIYYNANWELERTNQSGLERCEGDQDKRLHCYASWRNSSGTI |
| | (SEQ ID NO: 31) with 5 | ELVKKGCWLDDFNCYDRQECVATEENPQVYFCCCEGNFCNERFTHLPEAGG |
| | additional aa at N-terminus | PEVTYEPPPTAPT |
| 560 | Hybrid hu-ActRIIB-ECD | SGRGEAETRECIYYNANWELERTNQSGLERCEGDQDKRLHCYASWRNSSGT |
| | (SEQ ID NO: 31) with 6 | IELVKKGCWLDDFNCYDRQECVATEENPQVYFCCCEGNFCNERFTHLPEAG |
| | additional aa at N-terminus | GPEVTYEPPPTAPT |
| 561 | Hybrid hu-ActRIIB-ECD | AETRECIYYNANWELERTNQSGLERCYGDKDKRRHCYASWRNSSGTIELVK |
| | (SEQ ID NO: 32) with 1 | KGCWLDDINCYDRQECVEKKDSPEVYFCCCEGNFCNERFTHLPEAGGPEVT |
| | additional aa at N-terminus | YEPPPTAPT |
| 562 | Hybrid hu-ActRIIB-ECD | EAETRECIYYNANWELERTNQSGLERCYGDKDKRRHCYASWRNSSGTIELV |
| | (SEQ ID NO: 32) with 2 | KKGCWLDDINCYDRQECVEKKDSPEVYFCCCEGNFCNERFTHLPEAGGPEV |
| | additional aa at N-terminus | TYEPPPTAPT |
| 563 | Hybrid hu-ActRIIB-ECD | GEAETRECIYYNANWELERTNQSGLERCYGDKDKRRHCYASWRNSSGTIEL |
| | (SEQ ID NO: 32) with 3 | VKKGCWLDDINCYDRQECVEKKDSPEVYFCCCEGNFCNERFTHLPEAGGPE |
| | additional aa at N-terminus | VTYEPPPTAPT |
| 564 | Hybrid hu-ActRIIB-ECD | RGEAETRECIYYNANWELERTNQSGLERCYGDKDKRRHCYASWRNSSGTIE |
| | (SEQ ID NO: 32) with 4 | LVKKGCWLDDINCYDRQECVEKKDSPEVYFCCCEGNFCNERFTHLPEAGGP |
| | additional aa at N-terminus | EVTYEPPPTAPT |
| 565 | Hybrid hu-ActRIIB-ECD | GRGEAETRECIYYNANWELERTNQSGLERCYGDKDKRRHCYASWRNSSGTI |
| | (SEQ ID NO: 32) with 5 | ELVKKGCWLDDINCYDRQECVEKKDSPEVYFCCCEGNFCNERFTHLPEAGG |
| | additional aa at N-terminus | PEVTYEPPPTAPT |
| 566 | Hybrid hu-ActRIIB-ECD | SGRGEAETRECIYYNANWELERTNQSGLERCYGDKDKRRHCYASWRNSSG |
| | (SEQ ID NO: 32) with 6 | TIELVKKGCWLDDINCYDRQECVEKKDSPEVYFCCCEGNFCNERFTHLPEAG |
| | additional aa at N-terminus | GPEVTYEPPPTAPT |
| 567 | Hybrid hu-ActRIIB-ECD | AETRECIFFNANWEKDRTNQTGVEPCEGEQDKRLHCYASWRNSSGTIELVK |
| | (SEQ ID NO: 33) with 1 | KGCWLDDFNCYDRQECVATEENPQVYFCCCEGNFCNERFTHLPEAGGPEVT |
| | additional aa at N-terminus | YEPPPTAPT |
| 568 | Hybrid hu-ActRIIB-ECD | EAETRECIFFNANWEKDRTNQTGVEPCEGEQDKRLHCYASWRNSSGTIELV |
| | (SEQ ID NO: 33) with 2 | KKGCWLDDFNCYDRQECVATEENPQVYFCCCEGNFCNERFTHLPEAGGPEV |
| | additional aa at N-terminus | TYEPPPTAPT |
| 569 | Hybrid hu-ActRIIB-ECD | GEAETRECIFFNANWEKDRTNQTGVEPCEGEQDKRLHCYASWRNSSGTIEL |
| | (SEQ ID NO: 33) with 3 | VKKGCWLDDFNCYDRQECVATEENPQVYFCCCEGNFCNERFTHLPEAGGPE |
| | additional aa at N-terminus | VTYEPPPTAPT |
| 570 | Hybrid hu-ActRIIB-ECD | RGEAETRECIFFNANWEKDRTNQTGVEPCEGEQDKRLHCYASWRNSSGTIEL |
| | (SEQ ID NO: 33) with 4 | VKKGCWLDDFNCYDRQECVATEENPQVYFCCCEGNFCNERFTHLPEAGGPE |
| | additional aa at N-terminus | VTYEPPPTAPT |
| 571 | Hybrid hu-ActRIIB-ECD | GRGEAETRECIFFNANWEKDRTNQTGVEPCEGEQDKRLHCYASWRNSSGTI |
| | (SEQ ID NO: 33) with 5 | ELVKKGCWLDDFNCYDRQECVATEENPQVYFCCCEGNFCNERFTHLPEAGG |
| | additional aa at N-terminus | PEVTYEPPPTAPT |
| 572 | Hybrid hu-ActRIIB-ECD | SGRGEAETRECIFFNANWEKDRTNQTGVEPCEGEQDKRLHCYASWRNSSGT |
| | (SEQ ID NO: 33) with 6 | IELVKKGCWLDDFNCYDRQECVATEENPQVYFCCCEGNFCNERFTHLPEAG |
| | additional aa at N-terminus | GPEVTYEPPPTAPT |
| 573 | Hybrid hu-ActRIIB-ECD | AETRECIYYNANWELERTNQSGLERCEGEQDKRLHCFATWKNISGSIELVKQ |
| | (SEQ ID NO: 34) with 1 | GCWLDDFNCYDRQECVATEENPQVYFCCCEGNFCNERFTHLPEAGGPEVTY |
| | additional aa at N-terminus | EPPPTAPT |
| 574 | Hybrid hu-ActRIIB-ECD | EAETRECIYYNANWELERTNQSGLERCEGEQDKRLHCFATWKNISGSIELVK |
| | (SEQ ID NO: 34) with 2 | QGCWLDDFNCYDRQECVATEENPQVYFCCCEGNFCNERFTHLPEAGGPEVT |
| | additional aa at N-terminus | YEPPPTAPT |
| 575 | Hybrid hu-ActRIIB-ECD | GEAETRECIYYNANWELERTNQSGLERCEGEQDKRLHCFATWKNISGSIELV |
| | (SEQ ID NO: 34) with 3 | KQGCWLDDFNCYDRQECVATEENPQVYFCCCEGNFCNERFTHLPEAGGPEV |
| | additional aa at N-terminus | TYEPPPTAPT |
| 576 | Hybrid hu-ActRIIB-ECD | RGEAETRECIYYNANWELERTNQSGLERCEGEQDKRLHCFATWKNISGSIEL |
| | (SEQ ID NO: 34) with 4 | VKQGCWLDDFNCYDRQECVATEENPQVYFCCCEGNFCNERFTHLPEAGGPE |
| | additional aa at N-terminus | VTYEPPPTAPT |
| 577 | Hybrid hu-ActRIIB-ECD | GRGEAETRECIYYNANWELERTNQSGLERCEGEQDKRLHCFATWKNISGSIE |
| | (SEQ ID NO: 34) with 5 | LVKQGCWLDDFNCYDRQECVATEENPQVYFCCCEGNFCNERFTHLPEAGGP |
| | additional aa at N-terminus | EVTYEPPPTAPT |
| 578 | Hybrid hu-ActRIIB-ECD | SGRGEAETRECIYYNANWELERTNQSGLERCEGEQDKRLHCFATWKNISGSI |
| | (SEQ ID NO: 34) with 6 | ELVKQGCWLDDFNCYDRQECVATEENPQVYFCCCEGNFCNERFTHLPEAGG |
| | additional aa at N-terminus | PEVTYEPPPTAPT |
| 579 | Hybrid hu-ActRIIB-ECD | AETRECIYYNANWELERTNQSGLERCEGEQDKRLHCYASWRNSSGTIELVK |
| | (SEQ ID NO: 35) with 1 | KGCWLDDFNCYDRTDCVATEENPQVYFCCCEGNFCNERFTHLPEAGGPEVT |
| | additional aa at N-terminus | YEPPPTAPT |
| 580 | Hybrid hu-ActRIIB-ECD | EAETRECIYYNANWELERTNQSGLERCEGEQDKRLHCYASWRNSSGTIELV |
| | (SEQ ID NO: 35) with 2 | KKGCWLDDFNCYDRTDCVATEENPQVYFCCCEGNFCNERFTHLPEAGGPEV |
| | additional aa at N-terminus | TYEPPPTAPT |
| 581 | Hybrid hu-ActRIIB-ECD | GEAETRECIYYNANWELERTNQSGLERCEGEQDKRLHCYASWRNSSGTIEL |
| | (SEQ ID NO: 35) with 3 | VKKGCWLDDFNCYDRTDCVATEENPQVYFCCCEGNFCNERFTHLPEAGGPE |
| | additional aa at N-terminus | VTYEPPPTAPT |
| 582 | Hybrid hu-ActRIIB-ECD | RGEAETRECIYYNANWELERTNQSGLERCEGEQDKRLHCYASWRNSSGTIE |
| | (SEQ ID NO: 35) with 4 | LVKKGCWLDDFNCYDRTDCVATEENPQVYFCCCEGNFCNERFTHLPEAGGP |
| | additional aa at N-terminus | EVTYEPPPTAPT |
| 583 | Hybrid hu-ActRIIB-ECD | GRGEAETRECIYYNANWELERTNQSGLERCEGEQDKRLHCYASWRNSSGTI |
| | (SEQ ID NO: 35) with 5 | ELVKKGCWLDDFNCYDRTDCVATEENPQVYFCCCEGNFCNERFTHLPEAGG |
| | additional aa at N-terminus | PEVTYEPPPTAPT |
| 584 | Hybrid hu-ActRIIB-ECD | SGRGEAETRECIYYNANWELERTNQSGLERCEGEQDKRLHCYASWRNSSGT |
| | (SEQ ID NO: 35) with 6 | IELVKKGCWLDDFNCYDRTDCVATEENPQVYFCCCEGNFCNERFTHLPEAG |
| | additional aa at N-terminus | GPEVTYEPPPTAPT |
| 585 | Hybrid hu-ActRIIB-ECD | AETRECIYYNANWELERTNQSGLERCEGEQDKRLHCYASWRNSSGTIELVK |
| | (SEQ ID NO: 36) with 1 | KGCWLDDFNCYDRQECVATEENPQVYFCCCEGNMCNERFTHLPEAGGPEV |
| | additional aa at N-terminus | TYEPPPTAPT |
| 586 | Hybrid hu-ActRIIB-ECD | EAETRECIYYNANWELERTNQSGLERCEGEQDKRLHCYASWRNSSGTIELV |
| | (SEQ ID NO: 36) with 2 | KKGCWLDDFNCYDRQECVATEENPQVYFCCCEGNMCNERFTHLPEAGGPE |
| | additional aa at N-terminus | VTYEPPPTAPT |
| 587 | Hybrid hu-ActRIIB-ECD | GEAETRECIYYNANWELERTNQSGLERCEGEQDKRLHCYASWRNSSGTIEL |
| | (SEQ ID NO: 36) with 3 | VKKGCWLDDFNCYDRQECVATEENPQVYFCCCEGNMCNERFTHLPEAGGP |
| | additional aa at N-terminus | EVTYEPPPTAPT |
| 588 | Hybrid hu-ActRIIB-ECD | RGEAETRECIYYNANWELERTNQSGLERCEGEQDKRLHCYASWRNSSGTIE |
| | (SEQ ID NO: 36) with 4 | LVKKGCWLDDFNCYDRQECVATEENPQVYFCCCEGNMCNERFTHLPEAGG |
| | additional aa at N-terminus | PEVTYEPPPTAPT |
| 589 | Hybrid hu-ActRIIB-ECD | GRGEAETRECIYYNANWELERTNQSGLERCEGEQDKRLHCYASWRNSSGTI |
| | (SEQ ID NO: 36) with 5 | ELVKKGCWLDDFNCYDRQECVATEENPQVYFCCCEGNMCNERFTHLPEAG |
| | additional aa at N-terminus | GPEVTYEPPPTAPT |
| 590 | Hybrid hu-ActRIIB-ECD | SGRGEAETRECIYYNANWELERTNQSGLERCEGEQDKRLHCYASWRNSSGT |
| | (SEQ ID NO: 36) with 6 | IELVKKGCWLDDFNCYDRQECVATEENPQVYFCCCEGNMCNERFTHLPEAG |
| | additional aa at N-terminus | GPEVTYEPPPTAPT |
| 591 | Hybrid hu-ActRIIB-ECD | AETRECIYYNANWELERTNQSGLERCEGDQDKRLHCYASWRNSSGTIELVK |
| | (SEQ ID NO: 37) with 1 | KGCWLDDINCYDRQECVATEENPQVYFCCCEGNFCNERFTHLPEAGGPEVT |
| | additional aa at N-terminus | YEPPPTAPT |
| 592 | Hybrid hu-ActRIIB-ECD | EAETRECIYYNANWELERTNQSGLERCEGDQDKRLHCYASWRNSSGTIELV |
| | (SEQ ID NO: 37) with 2 | KKGCWLDDINCYDRQECVATEENPQVYFCCCEGNFCNERFTHLPEAGGPEV |
| | additional aa at N-terminus | TYEPPPTAPT |
| 593 | Hybrid hu-ActRIIB-ECD | GEAETRECIYYNANWELERTNQSGLERCEGDQDKRLHCYASWRNSSGTIEL |
| | (SEQ ID NO: 37) with 3 | VKKGCWLDDINCYDRQECVATEENPQVYFCCCEGNFCNERFTHLPEAGGPE |
| | additional aa at N-terminus | VTYEPPPTAPT |
| 594 | Hybrid hu-ActRIIB-ECD | RGEAETRECIYYNANWELERTNQSGLERCEGDQDKRLHCYASWRNSSGTIE |
| | (SEQ ID NO: 37) with 4 | LVKKGCWLDDINCYDRQECVATEENPQVYFCCCEGNFCNERFTHLPEAGGP |
| | additional aa at N-terminus | EVTYEPPPTAPT |
| 595 | Hybrid hu-ActRIIB-ECD | GRGEAETRECIYYNANWELERTNQSGLERCEGDQDKRLHCYASWRNSSGTI |
| | (SEQ ID NO: 37) with 5 | ELVKKGCWLDDINCYDRQECVATEENPQVYFCCCEGNFCNERFTHLPEAGG |
| | additional aa at N-terminus | PEVTYEPPPTAPT |
| 596 | Hybrid hu-ActRIIB-ECD | SGRGEAETRECIYYNANWELERTNQSGLERCEGDQDKRLHCYASWRNSSGT |
| | (SEQ ID NO: 37) with 6 | IELVKKGCWLDDINCYDRQECVATEENPQVYFCCCEGNFCNERFTHLPEAG |
| | additional aa at N-terminus | GPEVTYEPPPTAPT |
| 597 | Hybrid hu-ActRIIB-ECD | AETQECLFFNANWEKDRTNQSGVEPCYGDKDKRRHCYASWRNSSGTIELVK |
| | (SEQ ID NO: 51) with 1 | KGCWLDDFNCYDRQECVATEENPQVYFCCCEGNFCNERFTHLPEAGGPEVT |
| | additional aa at N-terminus | YEPPPTAPT |
| 598 | Hybrid hu-ActRIIB-ECD | EAETQECLFFNANWEKDRTNQSGVEPCYGDKDKRRHCYASWRNSSGTIELV |
| | (SEQ ID NO: 51) with 2 | KKGCWLDDFNCYDRQECVATEENPQVYFCCCEGNFCNERFTHLPEAGGPEV |
| | additional aa at N-terminus | TYEPPPTAPT |
| 599 | Hybrid hu-ActRIIB-ECD | GEAETQECLFFNANWEKDRTNQSGVEPCYGDKDKRRHCYASWRNSSGTIEL |
| | (SEQ ID NO: 51) with 3 | VKKGCWLDDFNCYDRQECVATEENPQVYFCCCEGNFCNERFTHLPEAGGPE |
| | additional aa at N-terminus | VTYEPPPTAPT |
| 600 | Hybrid hu-ActRIIB-ECD | RGEAETQECLFFNANWEKDRTNQSGVEPCYGDKDKRRHCYASWRNSSGTIE |
| | (SEQ ID NO: 51) with 4 | LVKKGCWLDDFNCYDRQECVATEENPQVYFCCCEGNFCNERFTHLPEAGGP |
| | additional aa at N-terminus | EVTYEPPPTAPT |
| 601 | Hybrid hu-ActRIIB-ECD | GRGEAETQECLFFNANWEKDRTNQSGVEPCYGDKDKRRHCYASWRNSSGT |
| | (SEQ ID NO: 51) with 5 | IELVKKGCWLDDFNCYDRQECVATEENPQVYFCCCEGNFCNERFTHLPEAG |
| | additional aa at N-terminus | GPEVTYEPPPTAPT |
| 602 | Hybrid hu-ActRIIB-ECD | SGRGEAETQECLFFNANWEKDRTNQSGVEPCYGDKDKRRHCYASWRNSSG |
| | (SEQ ID NO: 51) with 6 | TIELVKKGCWLDDFNCYDRQECVATEENPQVYFCCCEGNFCNERFTHLPEA |
| | additional aa at N-terminus | GGPEVTYEPPPTAPT |
| 603 | Hybrid hu-ActRIIB-ECD | AETQECLFFNANWEKDRTNQSGVEPCEGEQDKRLHCYASWRNSSGTIELVK |
| | (SEQ ID NO: 52) with 1 | KGCWLDDFNCYDRQECVATEENPQVYFCCCEGNFCNERFTHLPEAGGPEVT |
| | additional aa at N-terminus | YEPPPTAPT |
| 604 | Hybrid hu-ActRIIB-ECD | EAETQECLFFNANWEKDRTNQSGVEPCEGEQDKRLHCYASWRNSSGTIELV |
| | (SEQ ID NO: 52) with 2 | KKGCWLDDFNCYDRQECVATEENPQVYFCCCEGNFCNERFTHLPEAGGPEV |
| | additional aa at N-terminus | TYEPPPTAPT |
| 605 | Hybrid hu-ActRIIB-ECD | GEAETQECLFFNANWEKDRTNQSGVEPCEGEQDKRLHCYASWRNSSGTIEL |
| | (SEQ ID NO: 52) with 3 | VKKGCWLDDFNCYDRQECVATEENPQVYFCCCEGNFCNERFTHLPEAGGPE |
| | additional aa at N-terminus | VTYEPPPTAPT |
| 606 | Hybrid hu-ActRIIB-ECD | RGEAETQECLFFNANWEKDRTNQSGVEPCEGEQDKRLHCYASWRNSSGTIE |
| | (SEQ ID NO: 52) with 4 | LVKKGCWLDDFNCYDRQECVATEENPQVYFCCCEGNFCNERFTHLPEAGGP |
| | additional aa at N-terminus | EVTYEPPPTAPT |
| 607 | Hybrid hu-ActRIIB-ECD | GRGEAETQECLFFNANWEKDRTNQSGVEPCEGEQDKRLHCYASWRNSSGTI |
| | (SEQ ID NO: 52) with 5 | ELVKKGCWLDDFNCYDRQECVATEENPQVYFCCCEGNFCNERFTHLPEAGG |
| | additional aa at N-terminus | PEVTYEPPPTAPT |
| 608 | Hybrid hu-ActRIIB-ECD | SGRGEAETQECLFFNANWEKDRTNQSGVEPCEGEQDKRLHCYASWRNSSGT |
| | (SEQ ID NO: 52) with 6 | IELVKKGCWLDDFNCYDRQECVATEENPQVYFCCCEGNFCNERFTHLPEAG |
| | additional aa at N-terminus | GPEVTYEPPPTAPT |
| 609 | Hybrid hu-ActRIIB-ECD | AETRECLFFNANWEKDRTNQSGVEPCEGEQDKRLHCYASWRNSSGTIELVK |
| | (SEQ ID NO: 53) with 1 | KGCWLDDFNCYDRQECVATEENPQVYFCCCEGNFCNERFTHLPEAGGPEVT |
| | additional aa at N-terminus | YEPPPTAPT |
| 610 | Hybrid hu-ActRIIB-ECD | EAETRECLFFNANWEKDRTNQSGVEPCEGEQDKRLHCYASWRNSSGTIELV |
| | (SEQ ID NO: 53) with 2 | KKGCWLDDFNCYDRQECVATEENPQVYFCCCEGNFCNERFTHLPEAGGPEV |
| | additional aa at N-terminus | TYEPPPTAPT |
| 611 | Hybrid hu-ActRIIB-ECD | GEAETRECLFFNANWEKDRTNQSGVEPCEGEQDKRLHCYASWRNSSGTIEL |
| | (SEQ ID NO: 53) with 3 | VKKGCWLDDFNCYDRQECVATEENPQVYFCCCEGNFCNERFTHLPEAGGPE |
| | additional aa at N-terminus | VTYEPPPTAPT |
| 612 | Hybrid hu-ActRIIB-ECD | RGEAETRECLFFNANWEKDRTNQSGVEPCEGEQDKRLHCYASWRNSSGTIE |
| | (SEQ ID NO: 53) with 4 | LVKKGCWLDDFNCYDRQECVATEENPQVYFCCCEGNFCNERFTHLPEAGGP |
| | additional aa at N-terminus | EVTYEPPPTAPT |
| 613 | Hybrid hu-ActRIIB-ECD | GRGEAETRECLFFNANWEKDRTNQSGVEPCEGEQDKRLHCYASWRNSSGTI |
| | (SEQ ID NO: 53) with 5 | ELVKKGCWLDDFNCYDRQECVATEENPQVYFCCCEGNFCNERFTHLPEAGG |
| | additional aa at N-terminus | PEVTYEPPPTAPT |
| 614 | Hybrid hu-ActRIIB-ECD | SGRGEAETRECLFFNANWEKDRTNQSGVEPCEGEQDKRLHCYASWRNSSGT |
| | (SEQ ID NO: 53) with 6 | IELVKKGCWLDDFNCYDRQECVATEENPQVYFCCCEGNFCNERFTHLPEAG |
| | additional aa at N-terminus | GPEVTYEPPPTAPT |
| 615 | Hybrid hu-ActRIIB-ECD | AETQECLFFNANWEKDRTNQSGVEPCYGEQDKRLHCYASWRNSSGTIELVK |
| | (SEQ ID NO: 54) with 1 | KGCWLDDFNCYDRQECVATEENPQVYFCCCEGNFCNERFTHLPEAGGPEVT |
| | additional aa at N-terminus | YEPPPTAPT |
| 616 | Hybrid hu-ActRIIB-ECD | EAETQECLFFNANWEKDRTNQSGVEPCYGEQDKRLHCYASWRNSSGTIELV |
| | (SEQ ID NO: 54) with 2 | KKGCWLDDFNCYDRQECVATEENPQVYFCCCEGNFCNERFTHLPEAGGPEV |
| | additional aa at N-terminus | TYEPPPTAPT |
| 617 | Hybrid hu-ActRIIB-ECD | GEAETQECLFFNANWEKDRTNQSGVEPCYGEQDKRLHCYASWRNSSGTIEL |
| | (SEQ ID NO: 54) with 3 | VKKGCWLDDFNCYDRQECVATEENPQVYFCCCEGNFCNERFTHLPEAGGPE |
| | additional aa at N-terminus | VTYEPPPTAPT |
| 618 | Hybrid hu-ActRIIB-ECD | RGEAETQECLFFNANWEKDRINQSGVEPCYGEQDKRLHCYASWRNSSGTIE |
| | (SEQ ID NO: 54) with 4 | LVKKGCWLDDFNCYDRQECVATEENPQVYFCCCEGNFCNERFTHLPEAGGP |
| | additional aa at N-terminus | EVTYEPPPTAPT |
| 619 | Hybrid hu-ActRIIB-ECD | GRGEAETQECLFFNANWEKDRTNQSGVEPCYGEQDKRLHCYASWRNSSGTI |
| | (SEQ ID NO: 54) with 5 | ELVKKGCWLDDFNCYDRQECVATEENPQVYFCCCEGNFCNERFTHLPEAGG |
| | additional aa at N-terminus | PEVTYEPPPTAPT |
| 620 | Hybrid hu-ActRIIB-ECD | SGRGEAETQECLFFNANWEKDRTNQSGVEPCYGEQDKRLHCYASWRNSSG |
| | (SEQ ID NO: 54) with 6 | TIELVKKGCWLDDFNCYDRQECVATEENPQVYFCCCEGNFCNERFTHLPEA |
| | additional aa at N-terminus | GGPEVTYEPPPTAPT |
| 621 | Hybrid hu-ActRIIB-ECD | AETRECLFFNANWEKDRTNQSGVEPCYGDKDKRRHCYASWRNSSGTIELVK |
| | (SEQ ID NO: 55) with 1 | KGCWLDDFNCYDRQECVATEENPQVYFCCCEGNFCNERFTHLPEAGGPEVT |
| | additional aa at N-terminus | YEPPPTAPT |
| 622 | Hybrid hu-ActRIIB-ECD | EAETRECLFFNANWEKDRTNQSGVEPCYGDKDKRRHCYASWRNSSGTIELV |
| | (SEQ ID NO: 55) with 2 | KKGCWLDDFNCYDRQECVATEENPQVYFCCCEGNFCNERFTHLPEAGGPEV |
| | additional aa at N-terminus | TYEPPPTAPT |
| 623 | Hybrid hu-ActRIIB-ECD | GEAETRECLFFNANWEKDRTNQSGVEPCYGDKDKRRHCYASWRNSSGTIEL |
| | (SEQ ID NO: 55) with 3 | VKKGCWLDDFNCYDRQECVATEENPQVYFCCCEGNFCNERFTHLPEAGGPE |
| | additional aa at N-terminus | VTYEPPPTAPT |
| 624 | Hybrid hu-ActRIIB-ECD | RGEAETRECLFFNANWEKDRTNQSGVEPCYGDKDKRRHCYASWRNSSGTIE |
| | (SEQ ID NO: 55) with 4 | LVKKGCWLDDFNCYDRQECVATEENPQVYFCCCEGNFCNERFTHLPEAGGP |
| | additional aa at N-terminus | EVTYEPPPTAPT |
| 625 | Hybrid hu-ActRIIB-ECD | GRGEAETRECLFFNANWEKDRTNQSGVEPCYGDKDKRRHCYASWRNSSGTI |
| | (SEQ ID NO: 55) with 5 | ELVKKGCWLDDFNCYDRQECVATEENPQVYFCCCEGNFCNERFTHLPEAGG |
| | additional aa at N-terminus | PEVTYEPPPTAPT |
| 626 | Hybrid hu-ActRIIB-ECD | SGRGEAETRECLFFNANWEKDRTNQSGVEPCYGDKDKRRHCYASWRNSSG |
| | (SEQ ID NO: 55) with 6 | TIELVKKGCWLDDFNCYDRQECVATEENPQVYFCCCEGNFCNERFTHLPEA |
| | additional aa at N-terminus | GGPEVTYEPPPTAPT |
| 627 | Hybrid hu-ActRIIB-ECD | AETRECLFFNANWEKDRTNQTGVEPCYGDKDKRRHCFATWKNISGSIEIVK |
| | (SEQ ID NO: 56) with 1 | QGCWLDDFNCYDRQECVATEENPQVYFCCCEGNFCNERFTHLPEAGGPEVT |
| | additional aa at N-terminus | YEPPPTAPT |
| 628 | Hybrid hu-ActRIIB-ECD | EAETRECLFFNANWEKDRTNQTGVEPCYGDKDKRRHCFATWKNISGSIEIVK |
| | (SEQ ID NO: 56) with 2 | QGCWLDDFNCYDRQECVATEENPQVYFCCCEGNFCNERFTHLPEAGGPEVT |
| | additional aa at N-terminus | YEPPPTAPT |
| 629 | Hybrid hu-ActRIIB-ECD | GEAETRECLFFNANWEKDRTNQTGVEPCYGDKDKRRHCFATWKNISGSIEIV |
| | (SEQ ID NO: 56) with 3 | KQGCWLDDFNCYDRQECVATEENPQVYFCCCEGNFCNERFTHLPEAGGPEV |
| | additional aa at N-terminus | TYEPPPTAPT |
| 630 | Hybrid hu-ActRIIB-ECD | RGEAETRECLFFNANWEKDRTNQTGVEPCYGDKDKRRHCFATWKNISGSIEI |
| | (SEQ ID NO: 56) with 4 | VKQGCWLDDFNCYDRQECVATEENPQVYFCCCEGNFCNERFTHLPEAGGPE |
| | additional aa at N-terminus | VTYEPPPTAPT |
| 631 | Hybrid hu-ActRIIB-ECD | GRGEAETRECLFFNANWEKDRTNQTGVEPCYGDKDKRRHCFATWKNISGSI |
| | (SEQ ID NO: 56) with 5 | EIVKQGCWLDDFNCYDRQECVATEENPQVYFCCCEGNFCNERFTHLPEAGG |
| | additional aa at N-terminus | PEVTYEPPPTAPT |
| 632 | Hybrid hu-ActRIIB-ECD | SGRGEAETRECLFFNANWEKDRTNQTGVEPCYGDKDKRRHCFATWKNISGS |
| | (SEQ ID NO: 56) with 6 | IEIVKQGCWLDDFNCYDRQECVATEENPQVYFCCCEGNFCNERFTHLPEAG |
| | additional aa at N-terminus | GPEVTYEPPPTAPT |
| 633 | Hybrid hu-ActRIIB-ECD | AETRECLFFNANWEKDRTNQTGVEPCYGDKDKRRHCFATWKNISGSIEIVK |
| | (SEQ ID NO: 57) with 1 | QGCWLDDINCYDRQECVATEENPQVYFCCCEGNFCNERFTHLPEAGGPEVT |
| | additional aa at N-terminus | YEPPPTAPT |
| 634 | Hybrid hu-ActRIIB-ECD | EAETRECLFFNANWEKDRTNQTGVEPCYGDKDKRRHCFATWKNISGSIEIVK |
| | (SEQ ID NO: 57) with 2 | QGCWLDDINCYDRQECVATEENPQVYFCCCEGNFCNERFTHLPEAGGPEVT |
| | additional aa at N-terminus | YEPPPTAPT |
| 635 | Hybrid hu-ActRIIB-ECD | GEAETRECLFFNANWEKDRTNQTGVEPCYGDKDKRRHCFATWKNISGSIEIV |
| | (SEQ ID NO: 57) with 3 | KQGCWLDDINCYDRQECVATEENPQVYFCCCEGNFCNERFTHLPEAGGPEV |
| | additional aa at N-terminus | TYEPPPTAPT |
| 636 | Hybrid hu-ActRIIB-ECD | RGEAETRECLFFNANWEKDRTNQTGVEPCYGDKDKRRHCFATWKNISGSIEI |
| | (SEQ ID NO: 57) with 4 | VKQGCWLDDINCYDRQECVATEENPQVYFCCCEGNFCNERFTHLPEAGGPE |
| | additional aa at N-terminus | VTYEPPPTAPT |
| 637 | Hybrid hu-ActRIIB-ECD | GRGEAETRECLFFNANWEKDRTNQTGVEPCYGDKDKRRHCFATWKNISGSI |
| | (SEQ ID NO: 57) with 5 | EIVKQGCWLDDINCYDRQECVATEENPQVYFCCCEGNFCNERFTHLPEAGG |
| | additional aa at N-terminus | PEVTYEPPPTAPT |
| 638 | Hybrid hu-ActRIIB-ECD | SGRGEAETRECLFFNANWEKDRTNQTGVEPCYGDKDKRRHCFATWKNISGS |
| | (SEQ ID NO: 57) with 6 | IEIVKQGCWLDDINCYDRQECVATEENPQVYFCCCEGNFCNERFTHLPEAGG |
| | additional aa at N-terminus | PEVTYEPPPTAPT |
| 639 | Hybrid hu-ActRIIB-ECD | AETRECLFFNANWEKDRTNQTGVEPCYGDKDKRRHCFATWKNISGSIEIVK |
| | (SEQ ID NO: 58) with 1 | QGCWLDDINCYDRTDCVEKKDSPEVYFCCCEGNFCNERFTHLPEAGGPEVT |
| | additional aa at N-terminus | YEPPPTAPT |
| 640 | Hybrid hu-ActRIIB-ECD | EAETRECLFFNANWEKDRTNQTGVEPCYGDKDKRRHCFATWKNISGSIEIVK |
| | (SEQ ID NO: 58) with 2 | QGCWLDDINCYDRTDCVEKKDSPEVYFCCCEGNFCNERFTHLPEAGGPEVT |
| | additional aa at N-terminus | YEPPPTAPT |
| 641 | Hybrid hu-ActRIIB-ECD | GEAETRECLFFNANWEKDRTNQTGVEPCYGDKDKRRHCFATWKNISGSIEIV |
| | (SEQ ID NO: 58) with 3 | KQGCWLDDINCYDRTDCVEKKDSPEVYFCCCEGNFCNERFTHLPEAGGPEV |
| | additional aa at N-terminus | TYEPPPTAPT |
| 642 | Hybrid hu-ActRIIB-ECD | RGEAETRECLFFNANWEKDRTNQTGVEPCYGDKDKRRHCFATWKNISGSIEI |
| | (SEQ ID NO: 58) with 4 | VKQGCWLDDINCYDRTDCVEKKDSPEVYFCCCEGNFCNERFTHLPEAGGPE |
| | additional aa at N-terminus | VTYEPPPTAPT |
| 643 | Hybrid hu-ActRIIB-ECD | GRGEAETRECLFFNANWEKDRTNQTGVEPCYGDKDKRRHCFATWKNISGSI |
| | (SEQ ID NO: 58) with 5 | EIVKQGCWLDDINCYDRTDCVEKKDSPEVYFCCCEGNFCNERFTHLPEAGGP |
| | additional aa at N-terminus | EVTYEPPPTAPT |
| 644 | Hybrid hu-ActRIIB-ECD | SGRGEAETRECLFFNANWEKDRTNQTGVEPCYGDKDKRRHCFATWKNISGS |
| | (SEQ ID NO: 58) with 6 | IEIVKQGCWLDDINCYDRTDCVEKKDSPEVYFCCCEGNFCNERFTHLPEAGG |
| | additional aa at N-terminus | PEVTYEPPPTAPT |
| 645 | Hybrid hu-ActRIIB-ECD | AETQECIYYNANWELERTNQSGLERCYGDKDKRRHCFATWKNISGSIEIVKQ |
| | (SEQ ID NO: 59) with 1 | GCWLDDINCYDRQECVATEENPQVYFCCCEGNFCNERFTHLPEAGGPEVTY |
| | additional aa at N-terminus | EPPPTAPT |
| 646 | Hybrid hu-ActRIIB-ECD | EAETQECIYYNANWELERTNQSGLERCYGDKDKRRHCFATWKNISGSIEIVK |
| | (SEQ ID NO: 59) with 2 | QGCWLDDINCYDRQECVATEENPQVYFCCCEGNFCNERFTHLPEAGGPEVT |
| | additional aa at N-terminus | YEPPPTAPT |
| 647 | Hybrid hu-ActRIIB-ECD | GEAETQECIYYNANWELERTNQSGLERCYGDKDKRRHCFATWKNISGSIEIV |
| | (SEQ ID NO: 59) with 3 | KQGCWLDDINCYDRQECVATEENPQVYFCCCEGNFCNERFTHLPEAGGPEV |
| | additional aa at N-terminus | TYEPPPTAPT |
| 648 | Hybrid hu-ActRIIB-ECD | RGEAETQECIYYNANWELERTNQSGLERCYGDKDKRRHCFATWKNISGSIEI |
| | (SEQ ID NO: 59) with 4 | VKQGCWLDDINCYDRQECVATEENPQVYFCCCEGNFCNERFTHLPEAGGPE |
| | additional aa at N-terminus | VTYEPPPTAPT |
| 649 | Hybrid hu-ActRIIB-ECD | GRGEAETQECIYYNANWELERTNQSGLERCYGDKDKRRHCFATWKNISGSI |
| | (SEQ ID NO: 59) with 5 | EIVKQGCWLDDINCYDRQECVATEENPQVYFCCCEGNFCNERFTHLPEAGG |
| | additional aa at N-terminus | PEVTYEPPPTAPT |
| 650 | Hybrid hu-ActRIIB-ECD | SGRGEAETQECIYYNANWELERTNQSGLERCYGDKDKRRHCFATWKNISGS |
| | (SEQ ID NO: 59) with 6 | IEIVKQGCWLDDINCYDRQECVATEENPQVYFCCCEGNFCNERFTHLPEAGG |
| | additional aa at N-terminus | PEVTYEPPPTAPT |
| 651 | Hybrid hu-ActRIIB-ECD | AETRECIYYNANWELERTNQSGLERCYGDKDKRRHCFATWKNISGSIEIVKQ |
| | (SEQ ID NO: 60) with 1 | GCWLDDINCYDRTDCVEKKDSPEVYFCCCEGNFCNERFTHLPEAGGPEVTY |
| | additional aa at N-terminus | EPPPTAPT |
| 652 | Hybrid hu-ActRIIB-ECD | EAETRECIYYNANWELERTNQSGLERCYGDKDKRRHCFATWKNISGSIEIVK |
| | (SEQ ID NO: 60) with 2 | QGCWLDDINCYDRTDCVEKKDSPEVYFCCCEGNFCNERFTHLPEAGGPEVT |
| | additional aa at N-terminus | YEPPPTAPT |
| 653 | Hybrid hu-ActRIIB-ECD | GEAETRECIYYNANWELERTNQSGLERCYGDKDKRRHCFATWKNISGSIEIV |
| | (SEQ ID NO: 60) with 3 | KQGCWLDDINCYDRTDCVEKKDSPEVYFCCCEGNFCNERFTHLPEAGGPEV |
| | additional aa at N-terminus | TYEPPPTAPT |
| 654 | Hybrid hu-ActRIIB-ECD | RGEAETRECIYYNANWELERTNQSGLERCYGDKDKRRHCFATWKNISGSIEI |
| | (SEQ ID NO: 60) with 4 | VKQGCWLDDINCYDRTDCVEKKDSPEVYFCCCEGNFCNERFTHLPEAGGPE |
| | additional aa at N-terminus | VTYEPPPTAPT |
| 655 | Hybrid hu-ActRIIB-ECD | GRGEAETRECIYYNANWELERTNQSGLERCYGDKDKRRHCFATWKNISGSI |
| | (SEQ ID NO: 60) with 5 | EIVKQGCWLDDINCYDRTDCVEKKDSPEVYFCCCEGNFCNERFTHLPEAGGP |
| | additional aa at N-terminus | EVTYEPPPTAPT |
| 656 | Hybrid hu-ActRIIB-ECD | SGRGEAETRECIYYNANWELERTNQSGLERCYGDKDKRRHCFATWKNISGS |
| | (SEQ ID NO: 60) with 6 | IEIVKQGCWLDDINCYDRTDCVEKKDSPEVYFCCCEGNFCNERFTHLPEAGG |
| | additional aa at N-terminus | PEVTYEPPPTAPT |
| 657 | Hybrid hu-ActRIIB-ECD | AETRECIYYNANWELERTNQSGLERCYGDKDKRRHCFATWKNISGSIEIVKQ |
| | (SEQ ID NO: 61) with 1 | GCWLDDINCYDRTDCVEKKDSPEVYFCCCEGNMCNERFTHLPEAGGPEVTY |
| | additional aa at N-terminus | EPPPTAPT |
| 658 | Hybrid hu-ActRIIB-ECD | EAETRECIYYNANWELERTNQSGLERCYGDKDKRRHCFATWKNISGSIEIVK |
| | (SEQ ID NO: 61) with 2 | QGCWLDDINCYDRTDCVEKKDSPEVYFCCCEGNMCNERFTHLPEAGGPEVT |
| | additional aa at N-terminus | YEPPPTAPT |
| 659 | Hybrid hu-ActRIIB-ECD | GEAETRECIYYNANWELERTNQSGLERCYGDKDKRRHCFATWKNISGSIEIV |
| | (SEQ ID NO: 61) with 3 | KQGCWLDDINCYDRTDCVEKKDSPEVYFCCCEGNMCNERFTHLPEAGGPEV |
| | additional aa at N-terminus | TYEPPPTAPT |
| 660 | Hybrid hu-ActRIIB-ECD | RGEAETRECIYYNANWELERTNQSGLERCYGDKDKRRHCFATWKNISGSIEI |
| | (SEQ ID NO: 61) with 4 | VKQGCWLDDINCYDRTDCVEKKDSPEVYFCCCEGNMCNERFTHLPEAGGPE |
| | additional aa at N-terminus | VTYEPPPTAPT |
| 661 | Hybrid hu-ActRIIB-ECD | GRGEAETRECIYYNANWELERTNQSGLERCYGDKDKRRHCFATWKNISGSI |
| | (SEQ ID NO: 61) with 5 | EIVKQGCWLDDINCYDRTDCVEKKDSPEVYFCCCEGNMCNERFTHLPEAGG |
| | additional aa at N-terminus | PEVTYEPPPTAPT |
| 662 | Hybrid hu-ActRIIB-ECD | SGRGEAETRECIYYNANWELERTNQSGLERCYGDKDKRRHCFATWKNISGS |
| | (SEQ ID NO: 61) with 6 | IEIVKQGCWLDDINCYDRTDCVEKKDSPEVYFCCCEGNMCNERFTHLPEAG |
| | additional aa at N-terminus | GPEVTYEPPPTAPT |
| 663 | Hybrid hu-ActRIIB-ECD | AETRECIYYNANWELERTNQSGLERCEGEQDKRLHCFATWKNISGSIEIVKQ |
| | (SEQ ID NO: 62) with 1 | GCWLDDINCYDRTDCVEKKDSPEVYFCCCEGNFCNERFTHLPEAGGPEVTY |
| | additional aa at N-terminus | EPPPTAPT |
| 664 | Hybrid hu-ActRIIB-ECD | EAETRECIYYNANWELERTNQSGLERCEGEQDKRLHCFATWKNISGSIEIVK |
| | (SEQ ID NO: 62) with 2 | QGCWLDDINCYDRTDCVEKKDSPEVYFCCCEGNFCNERFTHLPEAGGPEVT |
| | additional aa at N-terminus | YEPPPTAPT |
| 665 | Hybrid hu-ActRIIB-ECD | GEAETRECIYYNANWELERTNQSGLERCEGEQDKRLHCFATWKNISGSIEIV |
| | (SEQ ID NO: 62) with 3 | KQGCWLDDINCYDRTDCVEKKDSPEVYFCCCEGNFCNERFTHLPEAGGPEV |
| | additional aa at N-terminus | TYEPPPTAPT |
| 666 | Hybrid hu-ActRIIB-ECD | RGEAETRECIYYNANWELERTNQSGLERCEGEQDKRLHCFATWKNISGSIEI |
| | (SEQ ID NO: 62) with 4 | VKQGCWLDDINCYDRTDCVEKKDSPEVYFCCCEGNFCNERFTHLPEAGGPE |
| | additional aa at N-terminus | VTYEPPPTAPT |
| 667 | Hybrid hu-ActRIIB-ECD | GRGEAETRECIYYNANWELERTNQSGLERCEGEQDKRLHCFATWKNISGSIE |
| | (SEQ ID NO: 62) with 5 | IVKQGCWLDDINCYDRTDCVEKKDSPEVYFCCCEGNFCNERFTHLPEAGGPE |
| | additional aa at N-terminus | VTYEPPPTAPT |
| 668 | Hybrid hu-ActRIIB-ECD | SGRGEAETRECIYYNANWELERTNQSGLERCEGEQDKRLHCFATWKNISGSI |
| | (SEQ ID NO: 62) with 6 | EIVKQGCWLDDINCYDRTDCVEKKDSPEVYFCCCEGNFCNERFTHLPEAGGP |
| | additional aa at N-terminus | EVTYEPPPTAPT |
| 669 | Hybrid hu-ActRIIB-ECD | AETRECIYYNANWELERTNQSGLERCEGEQDKRLHCFATWKNISGSIEIVKQ |
| | (SEQ ID NO: 63) with 1 | GCWLDDINCYDRTDCVATEENPQVYFCCCEGNFCNERFTHLPEAGGPEVTY |
| | additional aa at N-terminus | EPPPTAPT |
| 670 | Hybrid hu-ActRIIB-ECD | EAETRECIYYNANWELERTNQSGLERCEGEQDKRLHCFATWKNISGSIEIVK |
| | (SEQ ID NO: 63) with 2 | QGCWLDDINCYDRTDCVATEENPQVYFCCCEGNFCNERFTHLPEAGGPEVT |
| | additional aa at N-terminus | YEPPPTAPT |
| 671 | Hybrid hu-ActRIIB-ECD | GEAETRECIYYNANWELERTNQSGLERCEGEQDKRLHCFATWKNISGSIEIV |
| | (SEQ ID NO: 63) with 3 | KQGCWLDDINCYDRTDCVATEENPQVYFCCCEGNFCNERFTHLPEAGGPEV |
| | additional aa at N-terminus | TYEPPPTAPT |
| 672 | Hybrid hu-ActRIIB-ECD | RGEAETRECIYYNANWELERTNQSGLERCEGEQDKRLHCFATWKNISGSIEI |
| | (SEQ ID NO: 63) with 4 | VKQGCWLDDINCYDRTDCVATEENPQVYFCCCEGNFCNERFTHLPEAGGPE |
| | additional aa at N-terminus | VTYEPPPTAPT |
| 673 | Hybrid hu-ActRIIB-ECD | GRGEAETRECIYYNANWELERTNQSGLERCEGEQDKRLHCFATWKNISGSIE |
| | (SEQ ID NO: 63) with 5 | IVKQGCWLDDINCYDRTDCVATEENPQVYFCCCEGNFCNERFTHLPEAGGP |
| | additional aa at N-terminus | EVTYEPPPTAPT |
| 674 | Hybrid hu-ActRIIB-ECD | SGRGEAETRECIYYNANWELERTNQSGLERCEGEQDKRLHCFATWKNISGSI |
| | (SEQ ID NO: 63) with 6 | EIVKQGCWLDDINCYDRTDCVATEENPQVYFCCCEGNFCNERFTHLPEAGG |
| | additional aa at N-terminus | PEVTYEPPPTAPT |
| 675 | Hybrid hu-ActRIIB-ECD | AETRECIYYNANWELERTNQSGLERCEGEQDKRLHCFATWKNISGSIEIVKQ |
| | (SEQ ID NO: 64) with 1 | GCWLDDFNCYDRTDCVATEENPQVYFCCCEGNFCNERFTHLPEAGGPEVTY |
| | additional aa at N-terminus | EPPPTAPT |
| 676 | Hybrid hu-ActRIIB-ECD | EAETRECIYYNANWELERTNQSGLERCEGEQDKRLHCFATWKNISGSIEIVK |
| | (SEQ ID NO: 64) with 2 | QGCWLDDFNCYDRTDCVATEENPQVYFCCCEGNFCNERFTHLPEAGGPEVT |
| | additional aa at N-terminus | YEPPPTAPT |
| 677 | Hybrid hu-ActRIIB-ECD | GEAETRECIYYNANWELERTNQSGLERCEGEQDKRLHCFATWKNISGSIEIV |
| | (SEQ ID NO: 64) with 3 | KQGCWLDDFNCYDRTDCVATEENPQVYFCCCEGNFCNERFTHLPEAGGPEV |
| | additional aa at N-terminus | TYEPPPTAPT |
| 678 | Hybrid hu-ActRIIB-ECD | RGEAETRECIYYNANWELERTNQSGLERCEGEQDKRLHCFATWKNISGSIEI |
| | (SEQ ID NO: 64) with 4 | VKQGCWLDDFNCYDRTDCVATEENPQVYFCCCEGNFCNERFTHLPEAGGPE |
| | additional aa at N-terminus | VTYEPPPTAPT |
| 679 | Hybrid hu-ActRIIB-ECD | GRGEAETRECIYYNANWELERTNQSGLERCEGEQDKRLHCFATWKNISGSIE |
| | (SEQ ID NO: 64) with 5 | IVKQGCWLDDFNCYDRTDCVATEENPQVYFCCCEGNFCNERFTHLPEAGGP |
| | additional aa at N-terminus | EVTYEPPPTAPT |
| 680 | Hybrid hu-ActRIIB-ECD | SGRGEAETRECIYYNANWELERTNQSGLERCEGEQDKRLHCFATWKNISGSI |
| | (SEQ ID NO: 64) with 6 | EIVKQGCWLDDFNCYDRTDCVATEENPQVYFCCCEGNFCNERFTHLPEAGG |
| | additional aa at N-terminus | PEVTYEPPPTAPT |
| 681 | Hybrid hu-ActRIIB-ECD | AETRECIYYNANWELERTNQSGLERCEGEQDKRLHCFATWKNISGSIEIVKQ |
| | (SEQ ID NO: 65) with 1 | GCWLDDFNCYDRQECVATEENPQVYFCCCEGNFCNERFTHLPEAGGPEVTY |
| | additional aa at N-terminus | EPPPTAPT |
| 682 | Hybrid hu-ActRIIB-ECD | EAETRECIYYNANWELERTNQSGLERCEGEQDKRLHCFATWKNISGSIEIVK |
| | (SEQ ID NO: 65) with 2 | QGCWLDDFNCYDRQECVATEENPQVYFCCCEGNFCNERFTHLPEAGGPEVT |
| | additional aa at N-terminus | YEPPPTAPT |
| 683 | Hybrid hu-ActRIIB-ECD | GEAETRECIYYNANWELERTNQSGLERCEGEQDKRLHCFATWKNISGSIEIV |
| | (SEQ ID NO: 65) with 3 | KQGCWLDDFNCYDRQECVATEENPQVYFCCCEGNFCNERFTHLPEAGGPEV |
| | additional aa at N-terminus | TYEPPPTAPT |
| 684 | Hybrid hu-ActRIIB-ECD | RGEAETRECIYYNANWELERTNQSGLERCEGEQDKRLHCFATWKNISGSIEI |
| | (SEQ ID NO: 65) with 4 | VKQGCWLDDFNCYDRQECVATEENPQVYFCCCEGNFCNERFTHLPEAGGPE |
| | additional aa at N-terminus | VTYEPPPTAPT |
| 685 | Hybrid hu-ActRIIB-ECD | GRGEAETRECIYYNANWELERTNQSGLERCEGEQDKRLHCFATWKNISGSIE |
| | (SEQ ID NO: 65) with 5 | IVKQGCWLDDFNCYDRQECVATEENPQVYFCCCEGNFCNERFTHLPEAGGP |
| | additional aa at N-terminus | EVTYEPPPTAPT |
| 686 | Hybrid hu-ActRIIB-ECD | SGRGEAETRECIYYNANWELERTNQSGLERCEGEQDKRLHCFATWKNISGSI |
| | (SEQ ID NO: 65) with 6 | EIVKQGCWLDDFNCYDRQECVATEENPQVYFCCCEGNFCNERFTHLPEAGG |
| | additional aa at N-terminus | PEVTYEPPPTAPT |
| 687 | Hybrid hu-ActRIIB-ECD | AETQECIYYNANWELERTNQSGLERCYGDKDKRRHCYASWRNSSGTIELVK |
| | (SEQ ID NO: 66) with 1 | KGCWLDDINCYDRTDCVEKKDSPEVYFCCCEGNFCNERFTHLPEAGGPEVT |
| | additional aa at N-terminus | YEPPPTAPT |
| 688 | Hybrid hu-ActRIIB-ECD | EAETQECIYYNANWELERTNQSGLERCYGDKDKRRHCYASWRNSSGTIELV |
| | (SEQ ID NO: 66) with 2 | KKGCWLDDINCYDRTDCVEKKDSPEVYFCCCEGNFCNERFTHLPEAGGPEV |
| | additional aa at N-terminus | TYEPPPTAPT |
| 689 | Hybrid hu-ActRIIB-ECD | GEAETQECIYYNANWELERTNQSGLERCYGDKDKRRHCYASWRNSSGTIEL |
| | (SEQ ID NO: 66) with 3 | VKKGCWLDDINCYDRTDCVEKKDSPEVYFCCCEGNFCNERFTHLPEAGGPE |
| | additional aa at N-terminus | VTYEPPPTAPT |
| 690 | Hybrid hu-ActRIIB-ECD | RGEAETQECIYYNANWELERTNQSGLERCYGDKDKRRHCYASWRNSSGTIE |
| | (SEQ ID NO: 66) with 4 | LVKKGCWLDDINCYDRTDCVEKKDSPEVYFCCCEGNFCNERFTHLPEAGGP |
| | additional aa at N-terminus | EVTYEPPPTAPT |
| 691 | Hybrid hu-ActRIIB-ECD | GRGEAETQECIYYNANWELERTNQSGLERCYGDKDKRRHCYASWRNSSGTI |
| | (SEQ ID NO: 66) with 5 | ELVKKGCWLDDINCYDRTDCVEKKDSPEVYFCCCEGNFCNERFTHLPEAGG |
| | additional aa at N-terminus | PEVTYEPPPTAPT |
| 692 | Hybrid hu-ActRIIB-ECD | SGRGEAETQECIYYNANWELERTNQSGLERCYGDKDKRRHCYASWRNSSG |
| | (SEQ ID NO: 66) with 6 | TIELVKKGCWLDDINCYDRTDCVEKKDSPEVYFCCCEGNFCNERFTHLPEAG |
| | additional aa at N-terminus | GPEVTYEPPPTAPT |
| 693 | Hybrid hu-ActRIIB-ECD | AETQECIYYNANWELERTNQSGLERCYGDKDKRRHCYASWRNSSGTIELVK |
| | (SEQ ID NO: 67) with 1 | KGCWLDDINCYDRTDCVEKKDSPEVYFCCCEGNMCNERFTHLPEAGGPEVT |
| | additional aa at N-terminus | YEPPPTAPT |
| 694 | Hybrid hu-ActRIIB-ECD | EAETQECIYYNANWELERTNQSGLERCYGDKDKRRHCYASWRNSSGTIELV |
| | (SEQ ID NO: 67) with 2 | KKGCWLDDINCYDRTDCVEKKDSPEVYFCCCEGNMCNERFTHLPEAGGPEV |
| | additional aa at N-terminus | TYEPPPTAPT |
| 695 | Hybrid hu-ActRIIB-ECD | GEAETQECIYYNANWELERTNQSGLERCYGDKDKRRHCYASWRNSSGTIEL |
| | (SEQ ID NO: 67) with 3 | VKKGCWLDDINCYDRTDCVEKKDSPEVYFCCCEGNMCNERFTHLPEAGGPE |
| | additional aa at N-terminus | VTYEPPPTAPT |
| 696 | Hybrid hu-ActRIIB-ECD | RGEAETQECIYYNANWELERTNQSGLERCYGDKDKRRHCYASWRNSSGTIE |
| | (SEQ ID NO: 67) with 4 | LVKKGCWLDDINCYDRTDCVEKKDSPEVYFCCCEGNMCNERFTHLPEAGGP |
| | additional aa at N-terminus | EVTYEPPPTAPT |
| 697 | Hybrid hu-ActRIIB-ECD | GRGEAETQECIYYNANWELERTNQSGLERCYGDKDKRRHCYASWRNSSGTI |
| | (SEQ ID NO: 67) with 5 | ELVKKGCWLDDINCYDRTDCVEKKDSPEVYFCCCEGNMCNERFTHLPEAG |
| | additional aa at N-terminus | GPEVTYEPPPTAPT |
| 698 | Hybrid hu-ActRIIB-ECD | SGRGEAETQECIYYNANWELERTNQSGLERCYGDKDKRRHCYASWRNSSG |
| | (SEQ ID NO: 67) with 6 | TIELVKKGCWLDDINCYDRTDCVEKKDSPEVYFCCCEGNMCNERFTHLPEA |
| | additional aa at N-terminus | GGPEVTYEPPPTAPT |
| 699 | Hybrid hu-ActRIIB-ECD | AETQECIYYNANWELERTNQSGLERCYGDKDKRRHCFATWKNISGSIEIVKQ |
| | (SEQ ID NO: 68) with 1 | GCWLDDINCYDRTDCVEKKDSPEVYFCCCEGNMCNERFTHLPEAGGPEVTY |
| | additional aa at N-terminus | EPPPTAPT |
| 700 | Hybrid hu-ActRIIB-ECD | EAETQECIYYNANWELERTNQSGLERCYGDKDKRRHCFATWKNISGSIEIVK |
| | (SEQ ID NO: 68) with 2 | QGCWLDDINCYDRTDCVEKKDSPEVYFCCCEGNMCNERFTHLPEAGGPEVT |
| | additional aa at N-terminus | YEPPPTAPT |
| 701 | Hybrid hu-ActRIIB-ECD | GEAETQECIYYNANWELERTNQSGLERCYGDKDKRRHCFATWKNISGSIEIV |
| | (SEQ ID NO: 68) with 3 | KQGCWLDDINCYDRTDCVEKKDSPEVYFCCCEGNMCNERFTHLPEAGGPEV |
| | additional aa at N-terminus | TYEPPPTAPT |
| 702 | Hybrid hu-ActRIIB-ECD | RGEAETQECIYYNANWELERTNQSGLERCYGDKDKRRHCFATWKNISGSIEI |
| | (SEQ ID NO: 68) with 4 | VKQGCWLDDINCYDRTDCVEKKDSPEVYFCCCEGNMCNERFTHLPEAGGPE |
| | additional aa at N-terminus | VTYEPPPTAPT |
| 703 | Hybrid hu-ActRIIB-ECD | GRGEAETQECIYYNANWELERTNQSGLERCYGDKDKRRHCFATWKNISGSI |
| | (SEQ ID NO: 68) with 5 | EIVKQGCWLDDINCYDRTDCVEKKDSPEVYFCCCEGNMCNERFTHLPEAGG |
| | additional aa at N-terminus | PEVTYEPPPTAPT |
| 704 | Hybrid hu-ActRIIB-ECD | SGRGEAETQECIYYNANWELERTNQSGLERCYGDKDKRRHCFATWKNISGS |
| | (SEQ ID NO: 68) with 6 | IEIVKQGCWLDDINCYDRTDCVEKKDSPEVYFCCCEGNMCNERFTHLPEAG |
| | additional aa at N-terminus | GPEVTYEPPPTAPT |
| 705 | Hybrid hu-ActRIIB-ECD | AETQECIYYNANWELERTNQSGLERCYGDKDKRRHCFATWKNISGSIEIVKQ |
| | (SEQ ID NO: 69) with 1 | GCWLDDINCYDRTDCVEKKDSPEVYFCCCEGNFCNERFTHLPEAGGPEVTY |
| | additional aa at N-terminus | EPPPTAPT |
| 706 | Hybrid hu-ActRIIB-ECD | EAETQECIYYNANWELERTNQSGLERCYGDKDKRRHCFATWKNISGSIEIVK |
| | (SEQ ID NO: 69) with 2 | QGCWLDDINCYDRTDCVEKKDSPEVYFCCCEGNFCNERFTHLPEAGGPEVT |
| | additional aa at N-terminus | YEPPPTAPT |
| 707 | Hybrid hu-ActRIIB-ECD | GEAETQECIYYNANWELERTNQSGLERCYGDKDKRRHCFATWKNISGSIEIV |
| | (SEQ ID NO: 69) with 3 | KQGCWLDDINCYDRTDCVEKKDSPEVYFCCCEGNFCNERFTHLPEAGGPEV |
| | additional aa at N-terminus | TYEPPPTAPT |
| 708 | Hybrid hu-ActRIIB-ECD | RGEAETQECIYYNANWELERTNQSGLERCYGDKDKRRHCFATWKNISGSIEI |
| | (SEQ ID NO: 69) with 4 | VKQGCWLDDINCYDRTDCVEKKDSPEVYFCCCEGNFCNERFTHLPEAGGPE |
| | additional aa at N-terminus | VTYEPPPTAPT |
| 709 | Hybrid hu-ActRIIB-ECD | GRGEAETQECIYYNANWELERTNQSGLERCYGDKDKRRHCFATWKNISGSI |
| | (SEQ ID NO: 69) with 5 | EIVKQGCWLDDINCYDRTDCVEKKDSPEVYFCCCEGNFCNERFTHLPEAGGP |
| | additional aa at N-terminus | EVTYEPPPTAPT |
| 710 | Hybrid hu-ActRIIB-ECD | SGRGEAETQECIYYNANWELERTNQSGLERCYGDKDKRRHCFATWKNISGS |
| | (SEQ ID NO: 69) with 6 | IEIVKQGCWLDDINCYDRTDCVEKKDSPEVYFCCCEGNFCNERFTHLPEAGG |
| | additional aa at N-terminus | PEVTYEPPPTAPT |
| 711 | Hybrid hu-ActRIIB-ECD | AETRECLFFNANWEKDRTNQTGVEPCEGEQDKRLHCFATWKNISGSIEIVKQ |
| | (SEQ ID NO: 70) with 1 | GCWLDDINCYDRTDCVEKKDSPEVYFCCCEGNFCNERFTHLPEAGGPEVTY |
| | additional aa at N-terminus | EPPPTAPT |
| 712 | Hybrid hu-ActRIIB-ECD | EAETRECLFFNANWEKDRTNQTGVEPCEGEQDKRLHCFATWKNISGSIEIVK |
| | (SEQ ID NO: 70) with 2 | QGCWLDDINCYDRTDCVEKKDSPEVYFCCCEGNFCNERFTHLPEAGGPEVT |
| | additional aa at N-terminus | YEPPPTAPT |
| 713 | Hybrid hu-ActRIIB-ECD | GEAETRECLFFNANWEKDRTNQTGVEPCEGEQDKRLHCFATWKNISGSIEIV |
| | (SEQ ID NO: 70) with 3 | KQGCWLDDINCYDRTDCVEKKDSPEVYFCCCEGNFCNERFTHLPEAGGPEV |
| | additional aa at N-terminus | TYEPPPTAPT |
| 714 | Hybrid hu-ActRIIB-ECD | RGEAETRECLFFNANWEKDRTNQTGVEPCEGEQDKRLHCFATWKNISGSIEI |
| | (SEQ ID NO: 70) with 4 | VKQGCWLDDINCYDRTDCVEKKDSPEVYFCCCEGNFCNERFTHLPEAGGPE |
| | additional aa at N-terminus | VTYEPPPTAPT |
| 715 | Hybrid hu-ActRIIB-ECD | GRGEAETRECLFFNANWEKDRTNQTGVEPCEGEQDKRLHCFATWKNISGSI |
| | (SEQ ID NO: 70) with 5 | EIVKQGCWLDDINCYDRTDCVEKKDSPEVYFCCCEGNFCNERFTHLPEAGGP |
| | additional aa at N-terminus | EVTYEPPPTAPT |
| 716 | Hybrid hu-ActRIIB-ECD | SGRGEAETRECLFFNANWEKDRTNQTGVEPCEGEQDKRLHCFATWKNISGSI |
| | (SEQ ID NO: 70) with 6 | EIVKQGCWLDDINCYDRTDCVEKKDSPEVYFCCCEGNFCNERFTHLPEAGGP |
| | additional aa at N-terminus | EVTYEPPPTAPT |
| 717 | Hybrid hu-ActRIIB-ECD | AETRECLFFNANWEKDRTNQSGVEPCEGEQDKRLHCYASWRNSSGTIELVK |
| | (SEQ ID NO: 71) with 1 | KGCWLDDINCYDRTDCVEKKDSPEVYFCCCEGNFCNERFTHLPEAGGPEVT |
| | additional aa at N-terminus | YEPPPTAPT |
| 718 | Hybrid hu-ActRIIB-ECD | EAETRECLFFNANWEKDRTNQSGVEPCEGEQDKRLHCYASWRNSSGTIELV |
| | (SEQ ID NO: 71) with 2 | KKGCWLDDINCYDRTDCVEKKDSPEVYFCCCEGNFCNERFTHLPEAGGPEV |
| | additional aa at N-terminus | TYEPPPTAPT |
| 719 | Hybrid hu-ActRIIB-ECD | GEAETRECLFFNANWEKDRTNQSGVEPCEGEQDKRLHCYASWRNSSGTIEL |
| | (SEQ ID NO: 71) with 3 | VKKGCWLDDINCYDRTDCVEKKDSPEVYFCCCEGNFCNERFTHLPEAGGPE |
| | additional aa at N-terminus | VTYEPPPTAPT |
| 720 | Hybrid hu-ActRIIB-ECD | RGEAETRECLFFNANWEKDRTNQSGVEPCEGEQDKRLHCYASWRNSSGTIE |
| | (SEQ ID NO: 71) with 4 | LVKKGCWLDDINCYDRTDCVEKKDSPEVYFCCCEGNFCNERFTHLPEAGGP |
| | additional aa at N-terminus | EVTYEPPPTAPT |
| 721 | Hybrid hu-ActRIIB-ECD | GRGEAETRECLFFNANWEKDRTNQSGVEPCEGEQDKRLHCYASWRNSSGTI |
| | (SEQ ID NO: 71) with 5 | ELVKKGCWLDDINCYDRTDCVEKKDSPEVYFCCCEGNFCNERFTHLPEAGG |
| | additional aa at N-terminus | PEVTYEPPPTAPT |
| 722 | Hybrid hu-ActRIIB-ECD | SGRGEAETRECLFFNANWEKDRTNQSGVEPCEGEQDKRLHCYASWRNSSGT |
| | (SEQ ID NO: 71) with 6 | IELVKKGCWLDDINCYDRTDCVEKKDSPEVYFCCCEGNFCNERFTHLPEAG |
| | additional aa at N-terminus | GPEVTYEPPPTAPT |
| 723 | Hybrid hu-ActRIIB-ECD | AETRECLFFNANWEKDRTNQSGVEPCYGDKDKRRHCYASWRNSSGTIELVK |
| | (SEQ ID NO: 72) with 1 | KGCWLDDINCYDRTDCVEKKDSPEVYFCCCEGNFCNERFTHLPEAGGPEVT |
| | additional aa at N-terminus | YEPPPTAPT |
| 724 | Hybrid hu-ActRIIB-ECD | EAETRECLFFNANWEKDRTNQSGVEPCYGDKDKRRHCYASWRNSSGTIELV |
| | (SEQ ID NO: 72) with 2 | KKGCWLDDINCYDRTDCVEKKDSPEVYFCCCEGNFCNERFTHLPEAGGPEV |
| | additional aa at N-terminus | TYEPPPTAPT |
| 725 | Hybrid hu-ActRIIB-ECD | GEAETRECLFFNANWEKDRTNQSGVEPCYGDKDKRRHCYASWRNSSGTIEL |
| | (SEQ ID NO: 72) with 3 | VKKGCWLDDINCYDRTDCVEKKDSPEVYFCCCEGNFCNERFTHLPEAGGPE |
| | additional aa at N-terminus | VTYEPPPTAPT |
| 726 | Hybrid hu-ActRIIB-ECD | RGEAETRECLFFNANWEKDRTNQSGVEPCYGDKDKRRHCYASWRNSSGTIE |
| | (SEQ ID NO: 72) with 4 | LVKKGCWLDDINCYDRTDCVEKKDSPEVYFCCCEGNFCNERFTHLPEAGGP |
| | additional aa at N-terminus | EVTYEPPPTAPT |
| 727 | Hybrid hu-ActRIIB-ECD | GRGEAETRECLFFNANWEKDRTNQSGVEPCYGDKDKRRHCYASWRNSSGTI |
| | (SEQ ID NO: 72) with 5 | ELVKKGCWLDDINCYDRTDCVEKKDSPEVYFCCCEGNFCNERFTHLPEAGG |
| | additional aa at N-terminus | PEVTYEPPPTAPT |
| 728 | Hybrid hu-ActRIIB-ECD | SGRGEAETRECLFFNANWEKDRTNQSGVEPCYGDKDKRRHCYASWRNSSG |
| | (SEQ ID NO: 72) with 6 | TIELVKKGCWLDDINCYDRTDCVEKKDSPEVYFCCCEGNFCNERFTHLPEAG |
| | additional aa at N-terminus | GPEVTYEPPPTAPT |
| 729 | Hybrid hu-ActRIIB-ECD | AETRECIYYNANWELERTNQSGLERCYGDKDKRRHCYASWRNSSGTIELVK |
| | (SEQ ID NO: 73) with 1 | KGCWLDDFNCYDRTDCVATEENPQVYFCCCEGNFCNERFTHLPEAGGPEVT |
| | additional aa at N-terminus | YEPPPTAPT |
| 730 | Hybrid hu-ActRIIB-ECD | EAETRECIYYNANWELERTNQSGLERCYGDKDKRRHCYASWRNSSGTIELV |
| | (SEQ ID NO: 73) with 2 | KKGCWLDDFNCYDRTDCVATEENPQVYFCCCEGNFCNERFTHLPEAGGPEV |
| | additional aa at N-terminus | TYEPPPTAPT |
| 731 | Hybrid hu-ActRIIB-ECD | GEAETRECIYYNANWELERTNQSGLERCYGDKDKRRHCYASWRNSSGTIEL |
| | (SEQ ID NO: 73) with 3 | VKKGCWLDDFNCYDRTDCVATEENPQVYFCCCEGNFCNERFTHLPEAGGPE |
| | additional aa at N-terminus | VTYEPPPTAPT |
| 732 | Hybrid hu-ActRIIB-ECD | RGEAETRECIYYNANWELERTNQSGLERCYGDKDKRRHCYASWRNSSGTIE |
| | (SEQ ID NO: 73) with 4 | LVKKGCWLDDFNCYDRTDCVATEENPQVYFCCCEGNFCNERFTHLPEAGGP |
| | additional aa at N-terminus | EVTYEPPPTAPT |
| 733 | Hybrid hu-ActRIIB-ECD | GRGEAETRECIYYNANWELERTNQSGLERCYGDKDKRRHCYASWRNSSGTI |
| | (SEQ ID NO: 73) with 5 | ELVKKGCWLDDFNCYDRTDCVATEENPQVYFCCCEGNFCNERFTHLPEAGG |
| | additional aa at N-terminus | PEVTYEPPPTAPT |
| 734 | Hybrid hu-ActRIIB-ECD | SGRGEAETRECIYYNANWELERTNQSGLERCYGDKDKRRHCYASWRNSSG |
| | (SEQ ID NO: 73) with 6 | TIELVKKGCWLDDFNCYDRTDCVATEENPQVYFCCCEGNFCNERFTHLPEA |
| | additional aa at N-terminus | GGPEVTYEPPPTAPT |
| 735 | Hybrid hu-ActRIIB-ECD | AETRECIYYNANWELERTNQSGLERCYGDKDKRRHCYASWRNSSGTIELVK |
| | (SEQ ID NO: 74) with 1 | QGCWLDDFNCYDRTDCVATEENPQVYFCCCEGNFCNERFTHLPEAGGPEVT |
| | additional aa at N-terminus | YEPPPTAPT |
| 736 | Hybrid hu-ActRIIB-ECD | EAETRECIYYNANWELERTNQSGLERCYGDKDKRRHCYASWRNSSGTIELV |
| | (SEQ ID NO: 74) with 2 | KQGCWLDDFNCYDRTDCVATEENPQVYFCCCEGNFCNERFTHLPEAGGPEV |
| | additional aa at N-terminus | TYEPPPTAPT |
| 737 | Hybrid hu-ActRIIB-ECD | GEAETRECIYYNANWELERTNQSGLERCYGDKDKRRHCYASWRNSSGTIEL |
| | (SEQ ID NO: 74) with 3 | VKQGCWLDDFNCYDRTDCVATEENPQVYFCCCEGNFCNERFTHLPEAGGPE |
| | additional aa at N-terminus | VTYEPPPTAPT |
| 738 | Hybrid hu-ActRIIB-ECD | RGEAETRECIYYNANWELERTNQSGLERCYGDKDKRRHCYASWRNSSGTIE |
| | (SEQ ID NO: 74) with 4 | LVKQGCWLDDFNCYDRTDCVATEENPQVYFCCCEGNFCNERFTHLPEAGGP |
| | additional aa at N-terminus | EVTYEPPPTAPT |
| 739 | Hybrid hu-ActRIIB-ECD | GRGEAETRECIYYNANWELERTNQSGLERCYGDKDKRRHCYASWRNSSGTI |
| | (SEQ ID NO: 74) with 5 | ELVKQGCWLDDFNCYDRTDCVATEENPQVYFCCCEGNFCNERFTHLPEAGG |
| | additional aa at N-terminus | PEVTYEPPPTAPT |
| 740 | Hybrid hu-ActRIIB-ECD | SGRGEAETRECIYYNANWELERTNQSGLERCYGDKDKRRHCYASWRNSSG |
| | (SEQ ID NO: 74) with 6 | TIELVKQGCWLDDFNCYDRTDCVATEENPQVYFCCCEGNFCNERFTHLPEA |
| | additional aa at N-terminus | GGPEVTYEPPPTAPT |
| 741 | Hybrid hu-ActRIIB-ECD | AETRECIYYNANWELERTNQSGLERCYGDKDKRRHCYASWRNSSGTIEIVK |
| | (SEQ ID NO: 75) with 1 | KGCWLDDFNCYDRTDCVATEENPQVYFCCCEGNFCNERFTHLPEAGGPEVT |
| | additional aa at N-terminus | YEPPPTAPT |
| 742 | Hybrid hu-ActRIIB-ECD | EAETRECIYYNANWELERINQSGLERCYGDKDKRRHCYASWRNSSGTIEIV |
| | (SEQ ID NO: 75) with 2 | KKGCWLDDFNCYDRTDCVATEENPQVYFCCCEGNFCNERFTHLPEAGGPEV |
| | additional aa at N-terminus | TYEPPPTAPT |
| 743 | Hybrid hu-ActRIIB-ECD | GEAETRECIYYNANWELERTNQSGLERCYGDKDKRRHCYASWRNSSGTIEI |
| | (SEQ ID NO: 75) with 3 | VKKGCWLDDFNCYDRTDCVATEENPQVYFCCCEGNFCNERFTHLPEAGGPE |
| | additional aa at N-terminus | VTYEPPPTAPT |
| 744 | Hybrid hu-ActRIIB-ECD | RGEAETRECIYYNANWELERTNQSGLERCYGDKDKRRHCYASWRNSSGTIE |
| | (SEQ ID NO: 75) with 4 | IVKKGCWLDDFNCYDRTDCVATEENPQVYFCCCEGNFCNERFTHLPEAGGP |
| | additional aa at N-terminus | EVTYEPPPTAPT |
| 745 | Hybrid hu-ActRIIB-ECD | GRGEAETRECIYYNANWELERTNQSGLERCYGDKDKRRHCYASWRNSSGTI |
| | (SEQ ID NO: 75) with 5 | EIVKKGCWLDDFNCYDRTDCVATEENPQVYFCCCEGNFCNERFTHLPEAGG |
| | additional aa at N-terminus | PEVTYEPPPTAPT |
| 746 | Hybrid hu-ActRIIB-ECD | SGRGEAETRECIYYNANWELERTNQSGLERCYGDKDKRRHCYASWRNSSG |
| | (SEQ ID NO: 75) with 6 | TIEIVKKGCWLDDFNCYDRTDCVATEENPQVYFCCCEGNFCNERFTHLPEAG |
| | additional aa at N-terminus | GPEVTYEPPPTAPT |
| 747 | Hybrid hu-ActRIIB-ECD | AETRECIYYNANWELERTNQSGLERCYGDKDKRRHCYASWRNSSGSIELVK |
| | (SEQ ID NO: 76) with 1 | KGCWLDDFNCYDRTDCVATEENPQVYFCCCEGNFCNERFTHLPEAGGPEVT |
| | additional aa at N-terminus | YEPPPTAPT |
| 748 | Hybrid hu-ActRIIB-ECD | EAETRECIYYNANWELERTNQSGLERCYGDKDKRRHCYASWRNSSGSIELV |
| | (SEQ ID NO: 76) with 2 | KKGCWLDDFNCYDRTDCVATEENPQVYFCCCEGNFCNERFTHLPEAGGPEV |
| | additional aa at N-terminus | TYEPPPTAPT |
| 749 | Hybrid hu-ActRIIB-ECD | GEAETRECIYYNANWELERTNQSGLERCYGDKDKRRHCYASWRNSSGSIEL |
| | (SEQ ID NO: 76) with 3 | VKKGCWLDDFNCYDRTDCVATEENPQVYFCCCEGNFCNERFTHLPEAGGPE |
| | additional aa at N-terminus | VTYEPPPTAPT |
| 750 | Hybrid hu-ActRIIB-ECD | RGEAETRECIYYNANWELERTNQSGLERCYGDKDKRRHCYASWRNSSGSIE |
| | (SEQ ID NO: 76) with 4 | LVKKGCWLDDFNCYDRTDCVATEENPQVYFCCCEGNFCNERFTHLPEAGGP |
| | additional aa at N-terminus | EVTYEPPPTAPT |
| 751 | Hybrid hu-ActRIIB-ECD | GRGEAETRECIYYNANWELERTNQSGLERCYGDKDKRRHCYASWRNSSGSI |
| | (SEQ ID NO: 76) with 5 | ELVKKGCWLDDFNCYDRTDCVATEENPQVYFCCCEGNFCNERFTHLPEAGG |
| | additional aa at N-terminus | PEVTYEPPPTAPT |
| 752 | Hybrid hu-ActRIIB-ECD | SGRGEAETRECIYYNANWELERTNQSGLERCYGDKDKRRHCYASWRNSSGS |
| | (SEQ ID NO: 76) with 6 | IELVKKGCWLDDFNCYDRTDCVATEENPQVYFCCCEGNFCNERFTHLPEAG |
| | additional aa at N-terminus | GPEVTYEPPPTAPT |
| 753 | Hybrid hu-ActRIIB-ECD | AETRECIYYNANWELERTNQSGLERCYGDKDKRRHCYASWRNSSGSIEIVK |
| | (SEQ ID NO: 77) with 1 | KGCWLDDFNCYDRTDCVATEENPQVYFCCCEGNFCNERFTHLPEAGGPEVT |
| | additional aa at N-terminus | YEPPPTAPT |
| 754 | Hybrid hu-ActRIIB-ECD | EAETRECIYYNANWELERTNQSGLERCYGDKDKRRHCYASWRNSSGSIEIV |
| | (SEQ ID NO: 77) with 2 | KKGCWLDDFNCYDRTDCVATEENPQVYFCCCEGNFCNERFTHLPEAGGPEV |
| | additional aa at N-terminus | TYEPPPTAPT |
| 755 | Hybrid hu-ActRIIB-ECD | GEAETRECIYYNANWELERTNQSGLERCYGDKDKRRHCYASWRNSSGSIEI |
| | (SEQ ID NO: 77) with 3 | VKKGCWLDDFNCYDRTDCVATEENPQVYFCCCEGNFCNERFTHLPEAGGPE |
| | additional aa at N-terminus | VTYEPPPTAPT |
| 756 | Hybrid hu-ActRIIB-ECD | RGEAETRECIYYNANWELERTNQSGLERCYGDKDKRRHCYASWRNSSGSIEI |
| | (SEQ ID NO: 77) with 4 | VKKGCWLDDFNCYDRTDCVATEENPQVYFCCCEGNFCNERFTHLPEAGGPE |
| | additional aa at N-terminus | VTYEPPPTAPT |
| 757 | Hybrid hu-ActRIIB-ECD | GRGEAETRECIYYNANWELERTNQSGLERCYGDKDKRRHCYASWRNSSGSI |
| | (SEQ ID NO: 77) with 5 | EIVKKGCWLDDFNCYDRTDCVATEENPQVYFCCCEGNFCNERFTHLPEAGG |
| | additional aa at N-terminus | PEVTYEPPPTAPT |
| 758 | Hybrid hu-ActRIIB-ECD | SGRGEAETRECIYYNANWELERTNQSGLERCYGDKDKRRHCYASWRNSSGS |
| | (SEQ ID NO: 77) with 6 | IEIVKKGCWLDDFNCYDRTDCVATEENPQVYFCCCEGNFCNERFTHLPEAG |
| | additional aa at N-terminus | GPEVTYEPPPTAPT |
| 759 | Hybrid hu-ActRIIB-ECD | AETRECIYYNANWELERTNQSGLERCYGDKDKRRHCYASWRNSSGSIEIVK |
| | (SEQ ID NO: 78) with 1 | QGCWLDDFNCYDRTDCVATEENPQVYFCCCEGNFCNERFTHLPEAGGPEVT |
| | additional aa at N-terminus | YEPPPTAPT |
| 760 | Hybrid hu-ActRIIB-ECD | EAETRECIYYNANWELERTNQSGLERCYGDKDKRRHCYASWRNSSGSIEIV |
| | (SEQ ID NO: 78) with 2 | KQGCWLDDFNCYDRTDCVATEENPQVYFCCCEGNFCNERFTHLPEAGGPEV |
| | additional aa at N-terminus | TYEPPPTAPT |
| 761 | Hybrid hu-ActRIIB-ECD | GEAETRECIYYNANWELERTNQSGLERCYGDKDKRRHCYASWRNSSGSIEI |
| | (SEQ ID NO: 78) with 3 | VKQGCWLDDFNCYDRTDCVATEENPQVYFCCCEGNFCNERFTHLPEAGGPE |
| | additional aa at N-terminus | VTYEPPPTAPT |
| 762 | Hybrid hu-ActRIIB-ECD | RGEAETRECIYYNANWELERTNQSGLERCYGDKDKRRHCYASWRNSSGSIEI |
| | (SEQ ID NO: 78) with 4 | VKQGCWLDDFNCYDRTDCVATEENPQVYFCCCEGNFCNERFTHLPEAGGPE |
| | additional aa at N-terminus | VTYEPPPTAPT |
| 763 | Hybrid hu-ActRIIB-ECD | GRGEAETRECIYYNANWELERTNQSGLERCYGDKDKRRHCYASWRNSSGSI |
| | (SEQ ID NO: 78) with 5 | EIVKQGCWLDDFNCYDRTDCVATEENPQVYFCCCEGNFCNERFTHLPEAGG |
| | additional aa at N-terminus | PEVTYEPPPTAPT |
| 764 | Hybrid hu-ActRIIB-ECD | SGRGEAETRECIYYNANWELERTNQSGLERCYGDKDKRRHCYASWRNSSGS |
| | (SEQ ID NO: 78) with 6 | IEIVKQGCWLDDFNCYDRTDCVATEENPQVYFCCCEGNFCNERFTHLPEAG |
| | additional aa at N-terminus | GPEVTYEPPPTAPT |
| 765 | Hybrid hu-ActRIIB-ECD | AETRECIYYNANWELERTNQSGLERCEGEQDKRLHCYASWRNSSGTIELVK |
| | (SEQ ID NO: 79) with 1 | KGCWLDDFNCYDRTDCVATEENPQVYFCCCEGNFCNERFTHLPEAGGPEVT |
| | additional aa at N-terminus | YEPPPTAPT |
| 766 | Hybrid hu-ActRIIB-ECD | EAETRECIYYNANWELERTNQSGLERCEGEQDKRLHCYASWRNSSGTIELV |
| | (SEQ ID NO: 79) with 2 | KKGCWLDDFNCYDRTDCVATEENPQVYFCCCEGNFCNERFTHLPEAGGPEV |
| | additional aa at N-terminus | TYEPPPTAPT |
| 767 | Hybrid hu-ActRIIB-ECD | GEAETRECIYYNANWELERTNQSGLERCEGEQDKRLHCYASWRNSSGTIEL |
| | (SEQ ID NO: 79) with 3 | VKKGCWLDDFNCYDRTDCVATEENPQVYFCCCEGNFCNERFTHLPEAGGPE |
| | additional aa at N-terminus | VTYEPPPTAPT |
| 768 | Hybrid hu-ActRIIB-ECD | RGEAETRECIYYNANWELERTNQSGLERCEGEQDKRLHCYASWRNSSGTIE |
| | (SEQ ID NO: 79) with 4 | LVKKGCWLDDFNCYDRTDCVATEENPQVYFCCCEGNFCNERFTHLPEAGGP |
| | additional aa at N-terminus | EVTYEPPPTAPT |
| 769 | Hybrid hu-ActRIIB-ECD | GRGEAETRECIYYNANWELERTNQSGLERCEGEQDKRLHCYASWRNSSGTI |
| | (SEQ ID NO: 79) with 5 | ELVKKGCWLDDFNCYDRTDCVATEENPQVYFCCCEGNFCNERFTHLPEAGG |
| | additional aa at N-terminus | PEVTYEPPPTAPT |
| 770 | Hybrid hu-ActRIIB-ECD | SGRGEAETRECIYYNANWELERTNQSGLERCEGEQDKRLHCYASWRNSSGT |
| | (SEQ ID NO: 79) with 6 | IELVKKGCWLDDFNCYDRTDCVATEENPQVYFCCCEGNFCNERFTHLPEAG |
| | additional aa at N-terminus | GPEVTYEPPPTAPT |
| 771 | Hybrid hu-ActRIIB-ECD | AETRECIYYNANWELERTNQSGLERCEGEQDKRLHCYASWRNSSGTIELVK |
| | (SEQ ID NO: 80) with 1 | KGCWLDDFNCYDRQECVATEENPQVYFCCCEGNFCNEKFSYFPEMEVTQPT |
| | additional aa at N-terminus | SNPVTPKPP |
| 772 | Hybrid hu-ActRIIB-ECD | EAETRECIYYNANWELERTNQSGLERCEGEQDKRLHCYASWRNSSGTIELV |
| | (SEQ ID NO: 80) with 2 | KKGCWLDDFNCYDRQECVATEENPQVYFCCCEGNFCNEKFSYFPEMEVTQP |
| | additional aa at N-terminus | TSNPVTPKPP |
| 773 | Hybrid hu-ActRIIB-ECD | GEAETRECIYYNANWELERTNQSGLERCEGEQDKRLHCYASWRNSSGTIEL |
| | (SEQ ID NO: 80) with 3 | VKKGCWLDDFNCYDRQECVATEENPQVYFCCCEGNFCNEKFSYFPEMEVT |
| | additional aa at N-terminus | QPTSNPVTPKPP |
| 774 | Hybrid hu-ActRIIB-ECD | RGEAETRECIYYNANWELERTNQSGLERCEGEQDKRLHCYASWRNSSGTIE |
| | (SEQ ID NO: 80) with 4 | LVKKGCWLDDFNCYDRQECVATEENPQVYFCCCEGNFCNEKFSYFPEMEVT |
| | additional aa at N-terminus | QPTSNPVTPKPP |
| 775 | Hybrid hu-ActRIIB-ECD | GRGEAETRECIYYNANWELERTNQSGLERCEGEQDKRLHCYASWRNSSGTI |
| | (SEQ ID NO: 80) with 5 | ELVKKGCWLDDFNCYDRQECVATEENPQVYFCCCEGNFCNEKFSYFPEMEV |
| | additional aa at N-terminus | TQPTSNPVTPKPP |
| 776 | Hybrid hu-ActRIIB-ECD | SGRGEAETRECIYYNANWELERTNQSGLERCEGEQDKRLHCYASWRNSSGT |
| | (SEQ ID NO: 80) with 6 | IELVKKGCWLDDFNCYDRQECVATEENPQVYFCCCEGNFCNEKFSYFPEME |
| | additional aa at N-terminus | VTQPTSNPVTPKPP |
| 777 | Hybrid hu-ActRIIB-ECD | AETRECIYYNANWELERTNQSGLERCEGEQDKRLHCYASWRNSSGTIELVK |
| | (SEQ ID NO: 81) with 1 | KGCWLDDFNCYDRQECVATEENPQVYFCCCEGNFCNEKFSYFPQMEVTQPT |
| | additional aa at N-terminus | SNPVTPKPP |
| 778 | Hybrid hu-ActRIIB-ECD | EAETRECIYYNANWELERTNQSGLERCEGEQDKRLHCYASWRNSSGTIELV |
| | (SEQ ID NO: 81) with 2 | KKGCWLDDFNCYDRQECVATEENPQVYFCCCEGNFCNEKFSYFPQMEVTQ |
| | additional aa at N-terminus | PTSNPVTPKPP |
| 779 | Hybrid hu-ActRIIB-ECD | GEAETRECIYYNANWELERTNQSGLERCEGEQDKRLHCYASWRNSSGTIEL |
| | (SEQ ID NO: 81) with 3 | VKKGCWLDDFNCYDRQECVATEENPQVYFCCCEGNFCNEKFSYFPQMEVT |
| | additional aa at N-terminus | QPTSNPVTPKPP |
| 780 | Hybrid hu-ActRIIB-ECD | RGEAETRECIYYNANWELERTNQSGLERCEGEQDKRLHCYASWRNSSGTIE |
| | (SEQ ID NO: 81) with 4 | LVKKGCWLDDFNCYDRQECVATEENPQVYFCCCEGNFCNEKFSYFPQMEV |
| | additional aa at N-terminus | TQPTSNPVTPKPP |
| 781 | Hybrid hu-ActRIIB-ECD | GRGEAETRECIYYNANWELERTNQSGLERCEGEQDKRLHCYASWRNSSGTI |
| | (SEQ ID NO: 81) with 5 | ELVKKGCWLDDFNCYDRQECVATEENPQVYFCCCEGNFCNEKFSYFPQME |
| | additional aa at N-terminus | VTQPTSNPVTPKPP |
| 782 | Hybrid hu-ActRIIB-ECD | SGRGEAETRECIYYNANWELERTNQSGLERCEGEQDKRLHCYASWRNSSGT |
| | (SEQ ID NO: 81) with 6 | IELVKKGCWLDDFNCYDRQECVATEENPQVYFCCCEGNFCNEKFSYFPQME |
| | additional aa at N-terminus | VTQPTSNPVTPKPP |
| 783 | Hybrid hu-ActRIIB-ECD | AETRECIYYNANWELERTNQSGLERCYGDKDKRRHCYASWRNSSGTIELVK |
| | (SEQ ID NO: 82) with 1 | KGCWLDDINCYDRTDCVEKKDSPEVYFCCCEGNFCNEKFSYFPEMEVTQPT |
| | additional aa at N-terminus | SNPVTPKPP |
| 784 | Hybrid hu-ActRIIB-ECD | EAETRECIYYNANWELERTNQSGLERCYGDKDKRRHCYASWRNSSGTIELV |
| | (SEQ ID NO: 82) with 2 | KKGCWLDDINCYDRTDCVEKKDSPEVYFCCCEGNFCNEKFSYFPEMEVTQP |
| | additional aa at N-terminus | TSNPVTPKPP |
| 785 | Hybrid hu-ActRIIB-ECD | GEAETRECIYYNANWELERTNQSGLERCYGDKDKRRHCYASWRNSSGTIEL |
| | (SEQ ID NO: 82) with 3 | VKKGCWLDDINCYDRTDCVEKKDSPEVYFCCCEGNFCNEKFSYFPEMEVTQ |
| | additional aa at N-terminus | PTSNPVTPKPP |
| 786 | Hybrid hu-ActRIIB-ECD | RGEAETRECIYYNANWELERTNQSGLERCYGDKDKRRHCYASWRNSSGTIE |
| | (SEQ ID NO: 82) with 4 | LVKKGCWLDDINCYDRTDCVEKKDSPEVYFCCCEGNFCNEKFSYFPEMEVT |
| | additional aa at N-terminus | QPTSNPVTPKPP |
| 787 | Hybrid hu-ActRIIB-ECD | GRGEAETRECIYYNANWELERTNQSGLERCYGDKDKRRHCYASWRNSSGTI |
| | (SEQ ID NO: 82) with 5 | ELVKKGCWLDDINCYDRTDCVEKKDSPEVYFCCCEGNFCNEKFSYFPEMEV |
| | additional aa at N-terminus | TQPTSNPVTPKPP |
| 788 | Hybrid hu-ActRIIB-ECD | SGRGEAETRECIYYNANWELERTNQSGLERCYGDKDKRRHCYASWRNSSG |
| | (SEQ ID NO: 82) with 6 | TIELVKKGCWLDDINCYDRTDCVEKKDSPEVYFCCCEGNFCNEKFSYFPEME |
| | additional aa at N-terminus | VTQPTSNPVTPKPP |
| 789 | Hybrid hu-ActRIIB-ECD | AETRECIYYNANWELERTNQSGLERCYGDKDKRRHCYASWRNSSGTIELVK |
| | (SEQ ID NO: 83) with 1 | KGCWLDDINCYDRTDCVEKKDSPEVYFCCCEGNFCNEKFSYFPQMEVTQPT |
| | additional aa at N-terminus | SNPVTPKPP |
| 790 | Hybrid hu-ActRIIB-ECD | EAETRECIYYNANWELERTNQSGLERCYGDKDKRRHCYASWRNSSGTIELV |
| | (SEQ ID NO: 83) with 2 | KKGCWLDDINCYDRTDCVEKKDSPEVYFCCCEGNFCNEKFSYFPQMEVTQP |
| | additional aa at N-terminus | TSNPVTPKPP |
| 791 | Hybrid hu-ActRIIB-ECD | GEAETRECIYYNANWELERTNQSGLERCYGDKDKRRHCYASWRNSSGTIEL |
| | (SEQ ID NO: 83) with 3 | VKKGCWLDDINCYDRTDCVEKKDSPEVYFCCCEGNFCNEKFSYFPQMEVTQ |
| | additional aa at N-terminus | PTSNPVTPKPP |
| 792 | Hybrid hu-ActRIIB-ECD | RGEAETRECIYYNANWELERTNQSGLERCYGDKDKRRHCYASWRNSSGTIE |
| | (SEQ ID NO: 83) with 4 | LVKKGCWLDDINCYDRTDCVEKKDSPEVYFCCCEGNFCNEKFSYFPQMEVT |
| | additional aa at N-terminus | QPTSNPVTPKPP |
| 793 | Hybrid hu-ActRIIB-ECD | GRGEAETRECIYYNANWELERTNQSGLERCYGDKDKRRHCYASWRNSSGTI |
| | (SEQ ID NO: 83) with 5 | ELVKKGCWLDDINCYDRTDCVEKKDSPEVYFCCCEGNFCNEKFSYFPQMEV |
| | additional aa at N-terminus | TQPTSNPVTPKPP |
| 794 | Hybrid hu-ActRIIB-ECD | SGRGEAETRECIYYNANWELERTNQSGLERCYGDKDKRRHCYASWRNSSG |
| | (SEQ ID NO: 83) with 6 | TIELVKKGCWLDDINCYDRTDCVEKKDSPEVYFCCCEGNFCNEKFSYFPQM |
| | additional aa at N-terminus | EVTQPTSNPVTPKPP |
| 795 | Hybrid hu-ActRIIB-ECD | AETRECIYYNANWELERTNQSGLERCYGDKDKRRHCYASWRNSSGTIELVK |
| | (SEQ ID NO: 84) with 1 | KGCWLDDFNCYDRQECVATEENPQVYFCCCEGNFCNEKFSYFPQMEVTQPT |
| | additional aa at N-terminus | SNPVTPKPP |
| 796 | Hybrid hu-ActRIIB-ECD | EAETRECIYYNANWELERTNQSGLERCYGDKDKRRHCYASWRNSSGTIELV |
| | (SEQ ID NO: 84) with 2 | KKGCWLDDFNCYDRQECVATEENPQVYFCCCEGNFCNEKFSYFPQMEVTQ |
| | additional aa at N-terminus | PTSNPVTPKPP |
| 797 | Hybrid hu-ActRIIB-ECD | GEAETRECIYYNANWELERTNQSGLERCYGDKDKRRHCYASWRNSSGTIEL |
| | (SEQ ID NO: 84) with 3 | VKKGCWLDDFNCYDRQECVATEENPQVYFCCCEGNFCNEKFSYFPQMEVT |
| | additional aa at N-terminus | QPTSNPVTPKPP |
| 798 | Hybrid hu-ActRIIB-ECD | RGEAETRECIYYNANWELERTNQSGLERCYGDKDKRRHCYASWRNSSGTIE |
| | (SEQ ID NO: 84) with 4 | LVKKGCWLDDFNCYDRQECVATEENPQVYFCCCEGNFCNEKFSYFPQMEV |
| | additional aa at N-terminus | TQPTSNPVTPKPP |
| 799 | Hybrid hu-ActRIIB-ECD | GRGEAETRECIYYNANWELERTNQSGLERCYGDKDKRRHCYASWRNSSGTI |
| | (SEQ ID NO: 84) with 5 | ELVKKGCWLDDFNCYDRQECVATEENPQVYFCCCEGNFCNEKFSYFPQME |
| | additional aa at N-terminus | VTQPTSNPVTPKPP |
| 800 | Hybrid hu-ActRIIB-ECD | SGRGEAETRECIYYNANWELERTNQSGLERCYGDKDKRRHCYASWRNSSG |
| | (SEQ ID NO: 84) with 6 | TIELVKKGCWLDDFNCYDRQECVATEENPQVYFCCCEGNFCNEKFSYFPQM |
| | additional aa at N-terminus | EVTQPTSNPVTPKPP |
| 801 | Hybrid hu-ActRIIB-ECD | AETRECIYYNANWELERTNQSGLERCYGDKDKRRHCYASWRNSSGTIELVK |
| | (SEQ ID NO: 85) with 1 | QGCWLDDFNCYDRQECVATEENPQVYFCCCEGNFCNEKFSYFPQMEVTQPT |
| | additional aa at N-terminus | SNPVTPKPP |
| 802 | Hybrid hu-ActRIIB-ECD | EAETRECIYYNANWELERTNQSGLERCYGDKDKRRHCYASWRNSSGTIELV |
| | (SEQ ID NO: 85) with 2 | KQGCWLDDFNCYDRQECVATEENPQVYFCCCEGNFCNEKFSYFPQMEVTQ |
| | additional aa at N-terminus | PTSNPVTPKPP |
| 803 | Hybrid hu-ActRIIB-ECD | GEAETRECIYYNANWELERTNQSGLERCYGDKDKRRHCYASWRNSSGTIEL |
| | (SEQ ID NO: 85) with 3 | VKQGCWLDDFNCYDRQECVATEENPQVYFCCCEGNFCNEKFSYFPQMEVT |
| | additional aa at N-terminus | QPTSNPVTPKPP |
| 804 | Hybrid hu-ActRIIB-ECD | RGEAETRECIYYNANWELERTNQSGLERCYGDKDKRRHCYASWRNSSGTIE |
| | (SEQ ID NO: 85) with 4 | LVKQGCWLDDFNCYDRQECVATEENPQVYFCCCEGNFCNEKFSYFPQMEV |
| | additional aa at N-terminus | TQPTSNPVTPKPP |
| 805 | Hybrid hu-ActRIIB-ECD | GRGEAETRECIYYNANWELERTNQSGLERCYGDKDKRRHCYASWRNSSGTI |
| | (SEQ ID NO: 85) with 5 | ELVKQGCWLDDFNCYDRQECVATEENPQVYFCCCEGNFCNEKFSYFPQME |
| | additional aa at N-terminus | VTQPTSNPVTPKPP |
| 806 | Hybrid hu-ActRIIB-ECD | SGRGEAETRECIYYNANWELERTNQSGLERCYGDKDKRRHCYASWRNSSG |
| | (SEQ ID NO: 85) with 6 | TIELVKQGCWLDDFNCYDRQECVATEENPQVYFCCCEGNFCNEKFSYFPQM |
| | additional aa at N-terminus | EVTQPTSNPVTPKPP |
| 807 | Hybrid hu-ActRIIB-ECD | AETRECIYYNANWELERTNQSGLERCYGDKDKRRHCYASWRNSSGTIEIVK |
| | (SEQ ID NO: 86) with 1 | KGCWLDDFNCYDRQECVATKENPQVYFCCCEGNFCNEKFSYFPQMEVTQP |
| | additional aa at N-terminus | TSNPVTPKPP |
| 808 | Hybrid hu-ActRIIB-ECD | EAETRECIYYNANWELERTNQSGLERCYGDKDKRRHCYASWRNSSGTIEIV |
| | (SEQ ID NO: 86) with 2 | KKGCWLDDFNCYDRQECVATKENPQVYFCCCEGNFCNEKFSYFPQMEVTQ |
| | additional aa at N-terminus | PTSNPVTPKPP |
| 809 | Hybrid hu-ActRIIB-ECD | GEAETRECIYYNANWELERTNQSGLERCYGDKDKRRHCYASWRNSSGTIEI |
| | (SEQ ID NO: 86) with 3 | VKKGCWLDDFNCYDRQECVATKENPQVYFCCCEGNFCNEKFSYFPQMEVT |
| | additional aa at N-terminus | QPTSNPVTPKPP |
| 810 | Hybrid hu-ActRIIB-ECD | RGEAETRECIYYNANWELERTNQSGLERCYGDKDKRRHCYASWRNSSGTIE |
| | (SEQ ID NO: 86) with 4 | IVKKGCWLDDFNCYDRQECVATKENPQVYFCCCEGNFCNEKFSYFPQMEVT |
| | additional aa at N-terminus | QPTSNPVTPKPP |
| 811 | Hybrid hu-ActRIIB-ECD | GRGEAETRECIYYNANWELERTNQSGLERCYGDKDKRRHCYASWRNSSGTI |
| | (SEQ ID NO: 86) with 5 | EIVKKGCWLDDFNCYDRQECVATKENPQVYFCCCEGNFCNEKFSYFPQMEV |
| | additional aa at N-terminus | TQPTSNPVTPKPP |
| 812 | Hybrid hu-ActRIIB-ECD | SGRGEAETRECIYYNANWELERTNQSGLERCYGDKDKRRHCYASWRNSSG |
| | (SEQ ID NO: 86) with 6 | TIEIVKKGCWLDDFNCYDRQECVATKENPQVYFCCCEGNFCNEKFSYFPQM |
| | additional aa at N-terminus | EVTQPTSNPVTPKPP |
| 813 | Hybrid hu-ActRIIB-ECD | AETRECIYYNANWELERTNQSGLERCYGDKDKRRHCYASWRNSSGSIELVK |
| | (SEQ ID NO: 87) with 1 | KGCWLDDFNCYDRQECVATKENPQVYFCCCEGNFCNEKFSYFPQMEVTQP |
| | additional aa at N-terminus | TSNPVTPKPP |
| 814 | Hybrid hu-ActRIIB-ECD | EAETRECIYYNANWELERTNQSGLERCYGDKDKRRHCYASWRNSSGSIELV |
| | (SEQ ID NO: 87) with 2 | KKGCWLDDFNCYDRQECVATKENPQVYFCCCEGNFCNEKFSYFPQMEVTQ |
| | additional aa at N-terminus | PTSNPVTPKPP |
| 815 | Hybrid hu-ActRIIB-ECD | GEAETRECIYYNANWELERTNQSGLERCYGDKDKRRHCYASWRNSSGSIEL |
| | (SEQ ID NO: 87) with 3 | VKKGCWLDDFNCYDRQECVATKENPQVYFCCCEGNFCNEKFSYFPQMEVT |
| | additional aa at N-terminus | QPTSNPVTPKPP |
| 816 | Hybrid hu-ActRIIB-ECD | RGEAETRECIYYNANWELERTNQSGLERCYGDKDKRRHCYASWRNSSGSIE |
| | (SEQ ID NO: 87) with 4 | LVKKGCWLDDFNCYDRQECVATKENPQVYFCCCEGNFCNEKFSYFPQMEV |
| | additional aa at N-terminus | TQPTSNPVTPKPP |
| 817 | Hybrid hu-ActRIIB-ECD | GRGEAETRECIYYNANWELERTNQSGLERCYGDKDKRRHCYASWRNSSGSI |
| | (SEQ ID NO: 87) with 5 | ELVKKGCWLDDFNCYDRQECVATKENPQVYFCCCEGNFCNEKFSYFPQME |
| | additional aa at N-terminus | VTQPTSNPVTPKPP |
| 818 | Hybrid hu-ActRIIB-ECD | SGRGEAETRECIYYNANWELERTNQSGLERCYGDKDKRRHCYASWRNSSGS |
| | (SEQ ID NO: 87) with 6 | IELVKKGCWLDDFNCYDRQECVATKENPQVYFCCCEGNFCNEKFSYFPQME |
| | additional aa at N-terminus | VTQPTSNPVTPKPP |
| 819 | Hybrid hu-ActRIIB-ECD | AETRECIYYNANWELERTNQSGLERCEGEQDKRLHCYASWRNSSGSIELVK |
| | (SEQ ID NO: 88) with 1 | KGCWLDDFNCYDRQECVATEENPQVYFCCCEGNFCNEKFSYFPQMEVTQPT |
| | additional aa at N-terminus | SNPVTPKPP |
| 820 | Hybrid hu-ActRIIB-ECD | EAETRECIYYNANWELERTNQSGLERCEGEQDKRLHCYASWRNSSGSIELV |
| | (SEQ ID NO: 88) with 2 | KKGCWLDDFNCYDRQECVATEENPQVYFCCCEGNFCNEKFSYFPQMEVTQ |
| | additional aa at N-terminus | PTSNPVTPKPP |
| 821 | Hybrid hu-ActRIIB-ECD | GEAETRECIYYNANWELERTNQSGLERCEGEQDKRLHCYASWRNSSGSIEL |
| | (SEQ ID NO: 88) with 3 | VKKGCWLDDFNCYDRQECVATEENPQVYFCCCEGNFCNEKFSYFPQMEVT |
| | additional aa at N-terminus | QPTSNPVTPKPP |
| 822 | Hybrid hu-ActRIIB-ECD | RGEAETRECIYYNANWELERTNQSGLERCEGEQDKRLHCYASWRNSSGSIEL |
| | (SEQ ID NO: 88) with 4 | VKKGCWLDDFNCYDRQECVATEENPQVYFCCCEGNFCNEKFSYFPQMEVT |
| | additional aa at N-terminus | QPTSNPVTPKPP |
| 823 | Hybrid hu-ActRIIB-ECD | GRGEAETRECIYYNANWELERTNQSGLERCEGEQDKRLHCYASWRNSSGSI |
| | (SEQ ID NO: 88) with 5 | ELVKKGCWLDDFNCYDRQECVATEENPQVYFCCCEGNFCNEKFSYFPQME |
| | additional aa at N-terminus | VTQPTSNPVTPKPP |
| 824 | Hybrid hu-ActRIIB-ECD | SGRGEAETRECIYYNANWELERTNQSGLERCEGEQDKRLHCYASWRNSSGS |
| | (SEQ ID NO: 88) with 6 | IELVKKGCWLDDFNCYDRQECVATEENPQVYFCCCEGNFCNEKFSYFPQME |
| | additional aa at N-terminus | VTQPTSNPVTPKPP |
| 825 | Hybrid hu-ActRIIB-ECD | AETRECIYYNANWELERTNQSGLERCEGEQDKRLHCYASWRNSSGTIEIVKK |
| | (SEQ ID NO: 89) with 1 | GCWLDDFNCYDRQECVATEENPQVYFCCCEGNFCNEKFSYFPQMEVTQPTS |
| | additional aa at N-terminus | NPVTPKPP |
| 826 | Hybrid hu-ActRIIB-ECD | EAETRECIYYNANWELERTNQSGLERCEGEQDKRLHCYASWRNSSGTIEIVK |
| | (SEQ ID NO: 89) with 2 | KGCWLDDFNCYDRQECVATEENPQVYFCCCEGNFCNEKFSYFPQMEVTQPT |
| | additional aa at N-terminus | SNPVTPKPP |
| 827 | Hybrid hu-ActRIIB-ECD | GEAETRECIYYNANWELERTNQSGLERCEGEQDKRLHCYASWRNSSGTIEIV |
| | (SEQ ID NO: 89) with 3 | KKGCWLDDFNCYDRQECVATEENPQVYFCCCEGNFCNEKFSYFPQMEVTQ |
| | additional aa at N-terminus | PTSNPVTPKPP |
| 828 | Hybrid hu-ActRIIB-ECD | RGEAETRECIYYNANWELERTNQSGLERCEGEQDKRLHCYASWRNSSGTIEI |
| | (SEQ ID NO: 89) with 4 | VKKGCWLDDFNCYDRQECVATEENPQVYFCCCEGNFCNEKFSYFPQMEVT |
| | additional aa at N-terminus | QPTSNPVTPKPP |
| 829 | Hybrid hu-ActRIIB-ECD | GRGEAETRECIYYNANWELERTNQSGLERCEGEQDKRLHCYASWRNSSGTI |
| | (SEQ ID NO: 89) with 5 | EIVKKGCWLDDFNCYDRQECVATEENPQVYFCCCEGNFCNEKFSYFPQMEV |
| | additional aa at N-terminus | TQPTSNPVTPKPP |
| 830 | Hybrid hu-ActRIIB-ECD | SGRGEAETRECIYYNANWELERTNQSGLERCEGEQDKRLHCYASWRNSSGT |
| | (SEQ ID NO: 89) with 6 | IEIVKKGCWLDDFNCYDRQECVATEENPQVYFCCCEGNFCNEKFSYFPQME |
| | additional aa at N-terminus | VTQPTSNPVTPKPP |
| 831 | Hybrid hu-ActRIIB-ECD | AETRECIYYNANWELERTNQSGLERCEGEQDKRLHCYASWRNSSGTIELVK |
| | (SEQ ID NO: 90) with 1 | QGCWLDDFNCYDRQECVATEENPQVYFCCCEGNFCNEKFSYFPQMEVTQPT |
| | additional aa at N-terminus | SNPVTPKPP |
| 832 | Hybrid hu-ActRIIB-ECD | EAETRECIYYNANWELERTNQSGLERCEGEQDKRLHCYASWRNSSGTIELV |
| | (SEQ ID NO: 90) with 2 | KQGCWLDDFNCYDRQECVATEENPQVYFCCCEGNFCNEKFSYFPQMEVTQ |
| | additional aa at N-terminus | PTSNPVTPKPP |
| 833 | Hybrid hu-ActRIIB-ECD | GEAETRECIYYNANWELERTNQSGLERCEGEQDKRLHCYASWRNSSGTIEL |
| | (SEQ ID NO: 90) with 3 | VKQGCWLDDFNCYDRQECVATEENPQVYFCCCEGNFCNEKFSYFPQMEVT |
| | additional aa at N-terminus | QPTSNPVTPKPP |
| 834 | Hybrid hu-ActRIIB-ECD | RGEAETRECIYYNANWELERTNQSGLERCEGEQDKRLHCYASWRNSSGTIE |
| | (SEQ ID NO: 90) with 4 | LVKQGCWLDDFNCYDRQECVATEENPQVYFCCCEGNFCNEKFSYFPQMEV |
| | additional aa at N-terminus | TQPTSNPVTPKPP |
| 835 | Hybrid hu-ActRIIB-ECD | GRGEAETRECIYYNANWELERTNQSGLERCEGEQDKRLHCYASWRNSSGTI |
| | (SEQ ID NO: 90) with 5 | ELVKQGCWLDDFNCYDRQECVATEENPQVYFCCCEGNFCNEKFSYFPQME |
| | additional aa at N-terminus | VTQPTSNPVTPKPP |
| 836 | Hybrid hu-ActRIIB-ECD | SGRGEAETRECIYYNANWELERTNQSGLERCEGEQDKRLHCYASWRNSSGT |
| | (SEQ ID NO: 90) with 6 | IELVKQGCWLDDFNCYDRQECVATEENPQVYFCCCEGNFCNEKFSYFPQME |
| | additional aa at N-terminus | VTQPTSNPVTPKPP |
| 837 | Hybrid hu-ActRIIB-ECD | AETRECIYYNANWELERTNQSGLERCEGEQDKRLHCYASWRNSSGTIELVK |
| | (SEQ ID NO: 91) with 1 | KGCWLDDFNCYDRQECVETEENPQVYFCCCEGNFCNEKFSYFPQMEVTQPT |
| | additional aa at N-terminus | SNPVTPKPP |
| 838 | Hybrid hu-ActRIIB-ECD | EAETRECIYYNANWELERTNQSGLERCEGEQDKRLHCYASWRNSSGTIELV |
| | (SEQ ID NO: 91) with 2 | KKGCWLDDFNCYDRQECVETEENPQVYFCCCEGNFCNEKFSYFPQMEVTQP |
| | additional aa at N-terminus | TSNPVTPKPP |
| 839 | Hybrid hu-ActRIIB-ECD | GEAETRECIYYNANWELERTNQSGLERCEGEQDKRLHCYASWRNSSGTIEL |
| | (SEQ ID NO: 91) with 3 | VKKGCWLDDFNCYDRQECVETEENPQVYFCCCEGNFCNEKFSYFPQMEVT |
| | additional aa at N-terminus | QPTSNPVTPKPP |
| 840 | Hybrid hu-ActRIIB-ECD | RGEAETRECIYYNANWELERTNQSGLERCEGEQDKRLHCYASWRNSSGTIE |
| | (SEQ ID NO: 91) with 4 | LVKKGCWLDDFNCYDRQECVETEENPQVYFCCCEGNFCNEKFSYFPQMEVT |
| | additional aa at N-terminus | QPTSNPVTPKPP |
| 841 | Hybrid hu-ActRIIB-ECD | GRGEAETRECIYYNANWELERTNQSGLERCEGEQDKRLHCYASWRNSSGTI |
| | (SEQ ID NO: 91) with 5 | ELVKKGCWLDDFNCYDRQECVETEENPQVYFCCCEGNFCNEKFSYFPQMEV |
| | additional aa at N-terminus | TQPTSNPVTPKPP |
| 842 | Hybrid hu-ActRIIB-ECD | SGRGEAETRECIYYNANWELERTNQSGLERCEGEQDKRLHCYASWRNSSGT |
| | (SEQ ID NO: 91) with 6 | IELVKKGCWLDDFNCYDRQECVETEENPQVYFCCCEGNFCNEKFSYFPQME |
| | additional aa at N-terminus | VTQPTSNPVTPKPP |
| 843 | Hybrid hu-ActRIIB-ECD | AETRECIYYNANWELERTNQSGLERCEGEQDKRLHCYASWRNSSGTIELVK |
| | (SEQ ID NO: 92) with 1 | KGCWLDDFNCYDRQECVAKEENPQVYFCCCEGNFCNEKFSYFPQMEVTQP |
| | additional aa at N-terminus | TSNPVTPKPP |
| 844 | Hybrid hu-ActRIIB-ECD | EAETRECIYYNANWELERTNQSGLERCEGEQDKRLHCYASWRNSSGTIELV |
| | (SEQ ID NO: 92) with 2 | KKGCWLDDFNCYDRQECVAKEENPQVYFCCCEGNFCNEKFSYFPQMEVTQ |
| | additional aa at N-terminus | PTSNPVTPKPP |
| 845 | Hybrid hu-ActRIIB-ECD | GEAETRECIYYNANWELERTNQSGLERCEGEQDKRLHCYASWRNSSGTIEL |
| | (SEQ ID NO: 92) with 3 | VKKGCWLDDFNCYDRQECVAKEENPQVYFCCCEGNFCNEKFSYFPQMEVT |
| | additional aa at N-terminus | QPTSNPVTPKPP |
| 846 | Hybrid hu-ActRIIB-ECD | RGEAETRECIYYNANWELERTNQSGLERCEGEQDKRLHCYASWRNSSGTIE |
| | (SEQ ID NO: 92) with 4 | LVKKGCWLDDFNCYDRQECVAKEENPQVYFCCCEGNFCNEKFSYFPQMEV |
| | additional aa at N-terminus | TQPTSNPVTPKPP |
| 847 | Hybrid hu-ActRIIB-ECD | GRGEAETRECIYYNANWELERTNQSGLERCEGEQDKRLHCYASWRNSSGTI |
| | (SEQ ID NO: 92) with 5 | ELVKKGCWLDDFNCYDRQECVAKEENPQVYFCCCEGNFCNEKFSYFPQME |
| | additional aa at N-terminus | VTQPTSNPVTPKPP |
| 848 | Hybrid hu-ActRIIB-ECD | SGRGEAETRECIYYNANWELERTNQSGLERCEGEQDKRLHCYASWRNSSGT |
| | (SEQ ID NO: 92) with 6 | IELVKKGCWLDDFNCYDRQECVAKEENPQVYFCCCEGNFCNEKFSYFPQME |
| | additional aa at N-terminus | VTQPTSNPVTPKPP |
| 849 | Hybrid hu-ActRIIB-ECD | AETRECIYYNANWELERTNQSGLERCEGEQDKRLHCYASWRNSSGTIELVK |
| | (SEQ ID NO: 93) with 1 | KGCWLDDFNCYDRQECVATKENPQVYFCCCEGNFCNEKFSYFPQMEVTQP |
| | additional aa at N-terminus | TSNPVTPKPP |
| 850 | Hybrid hu-ActRIIB-ECD | EAETRECIYYNANWELERTNQSGLERCEGEQDKRLHCYASWRNSSGTIELV |
| | (SEQ ID NO: 93) with 2 | KKGCWLDDFNCYDRQECVATKENPQVYFCCCEGNFCNEKFSYFPQMEVTQ |
| | additional aa at N-terminus | PTSNPVTPKPP |
| 851 | Hybrid hu-ActRIIB-ECD | GEAETRECIYYNANWELERTNQSGLERCEGEQDKRLHCYASWRNSSGTIEL |
| | (SEQ ID NO: 93) with 3 | VKKGCWLDDFNCYDRQECVATKENPQVYFCCCEGNFCNEKFSYFPQMEVT |
| | additional aa at N-terminus | QPTSNPVTPKPP |
| 852 | Hybrid hu-ActRIIB-ECD | RGEAETRECIYYNANWELERTNQSGLERCEGEQDKRLHCYASWRNSSGTIE |
| | (SEQ ID NO: 93) with 4 | LVKKGCWLDDFNCYDRQECVATKENPQVYFCCCEGNFCNEKFSYFPQMEV |
| | additional aa at N-terminus | TQPTSNPVTPKPP |
| 853 | Hybrid hu-ActRIIB-ECD | GRGEAETRECIYYNANWELERTNQSGLERCEGEQDKRLHCYASWRNSSGTI |
| | (SEQ ID NO: 93) with 5 | ELVKKGCWLDDFNCYDRQECVATKENPQVYFCCCEGNFCNEKFSYFPQME |
| | additional aa at N-terminus | VTQPTSNPVTPKPP |
| 854 | Hybrid hu-ActRIIB-ECD | SGRGEAETRECIYYNANWELERTNQSGLERCEGEQDKRLHCYASWRNSSGT |
| | (SEQ ID NO: 93) with 6 | IELVKKGCWLDDFNCYDRQECVATKENPQVYFCCCEGNFCNEKFSYFPQME |
| | additional aa at N-terminus | VTQPTSNPVTPKPP |
| 855 | Hybrid hu-ActRIIB-ECD | AETRECIYYNANWELERTNQSGLERCEGEQDKRLHCYASWRNSSGTIELVK |
| | (SEQ ID NO: 94) with 1 | KGCWLDDFNCYDRQECVATEDNPQVYFCCCEGNFCNEKFSYFPQMEVTQP |
| | additional aa at N-terminus | TSNPVTPKPP |
| 856 | Hybrid hu-ActRIIB-ECD | EAETRECIYYNANWELERTNQSGLERCEGEQDKRLHCYASWRNSSGTIELV |
| | (SEQ ID NO: 94) with 2 | KKGCWLDDFNCYDRQECVATEDNPQVYFCCCEGNFCNEKFSYFPQMEVTQ |
| | additional aa at N-terminus | PTSNPVTPKPP |
| 857 | Hybrid hu-ActRIIB-ECD | GEAETRECIYYNANWELERTNQSGLERCEGEQDKRLHCYASWRNSSGTIEL |
| | (SEQ ID NO: 94) with 3 | VKKGCWLDDFNCYDRQECVATEDNPQVYFCCCEGNFCNEKFSYFPQMEVT |
| | additional aa at N-terminus | QPTSNPVTPKPP |
| 858 | Hybrid hu-ActRIIB-ECD | RGEAETRECIYYNANWELERTNQSGLERCEGEQDKRLHCYASWRNSSGTIE |
| | (SEQ ID NO: 94) with 4 | LVKKGCWLDDFNCYDRQECVATEDNPQVYFCCCEGNFCNEKFSYFPQMEV |
| | additional aa at N-terminus | TQPTSNPVTPKPP |
| 859 | Hybrid hu-ActRIIB-ECD | GRGEAETRECIYYNANWELERTNQSGLERCEGEQDKRLHCYASWRNSSGTI |
| | (SEQ ID NO: 94) with 5 | ELVKKGCWLDDFNCYDRQECVATEDNPQVYFCCCEGNFCNEKFSYFPQME |
| | additional aa at N-terminus | VTQPTSNPVTPKPP |
| 860 | Hybrid hu-ActRIIB-ECD | SGRGEAETRECIYYNANWELERTNQSGLERCEGEQDKRLHCYASWRNSSGT |
| | (SEQ ID NO: 94) with 6 | IELVKKGCWLDDFNCYDRQECVATEDNPQVYFCCCEGNFCNEKFSYFPQME |
| | additional aa at N-terminus | VTQPTSNPVTPKPP |
| 861 | Hybrid hu-ActRIIB-ECD | AETRECIYYNANWELERTNQSGLERCEGEQDKRLHCYASWRNSSGTIELVK |
| | (SEQ ID NO: 95) with 1 | KGCWLDDFNCYDRQECVATEESPQVYFCCCEGNFCNEKFSYFPQMEVTQPT |
| | additional aa at N-terminus | SNPVTPKPP |
| 862 | Hybrid hu-ActRIIB-ECD | EAETRECIYYNANWELERTNQSGLERCEGEQDKRLHCYASWRNSSGTIELV |
| | (SEQ ID NO: 95) with 2 | KKGCWLDDFNCYDRQECVATEESPQVYFCCCEGNFCNEKFSYFPQMEVTQP |
| | additional aa at N-terminus | TSNPVTPKPP |
| 863 | Hybrid hu-ActRIIB-ECD | GEAETRECIYYNANWELERTNQSGLERCEGEQDKRLHCYASWRNSSGTIEL |
| | (SEQ ID NO: 95) with 3 | VKKGCWLDDFNCYDRQECVATEESPQVYFCCCEGNFCNEKFSYFPQMEVT |
| | additional aa at N-terminus | QPTSNPVTPKPP |
| 864 | Hybrid hu-ActRIIB-ECD | RGEAETRECIYYNANWELERTNQSGLERCEGEQDKRLHCYASWRNSSGTIE |
| | (SEQ ID NO: 95) with 4 | LVKKGCWLDDFNCYDRQECVATEESPQVYFCCCEGNFCNEKFSYFPQMEVT |
| | additional aa at N-terminus | QPTSNPVTPKPP |
| 865 | Hybrid hu-ActRIIB-ECD | GRGEAETRECIYYNANWELERTNQSGLERCEGEQDKRLHCYASWRNSSGTI |
| | (SEQ ID NO: 95) with 5 | ELVKKGCWLDDFNCYDRQECVATEESPQVYFCCCEGNFCNEKFSYFPQMEV |
| | additional aa at N-terminus | TQPTSNPVTPKPP |
| 866 | Hybrid hu-ActRIIB-ECD | SGRGEAETRECIYYNANWELERTNQSGLERCEGEQDKRLHCYASWRNSSGT |
| | (SEQ ID NO: 95) with 6 | IELVKKGCWLDDFNCYDRQECVATEESPQVYFCCCEGNFCNEKFSYFPQME |
| | additional aa at N-terminus | VTQPTSNPVTPKPP |
| 867 | Hybrid hu-ActRIIB-ECD | AETRECIYYNANWELERTNQSGLERCEGEQDKRLHCYASWRNSSGTIELVK |
| | (SEQ ID NO: 96) with 1 | KGCWLDDFNCYDRQECVATEENPEVYFCCCEGNFCNEKFSYFPQMEVTQPT |
| | additional aa at N-terminus | SNPVTPKPP |
| 868 | Hybrid hu-ActRIIB-ECD | EAETRECIYYNANWELERTNQSGLERCEGEQDKRLHCYASWRNSSGTIELV |
| | (SEQ ID NO: 96) with 2 | KKGCWLDDFNCYDRQECVATEENPEVYFCCCEGNFCNEKFSYFPQMEVTQP |
| | additional aa at N-terminus | TSNPVTPKPP |
| 869 | Hybrid hu-ActRIIB-ECD | GEAETRECIYYNANWELERTNQSGLERCEGEQDKRLHCYASWRNSSGTIEL |
| | (SEQ ID NO: 96) with 3 | VKKGCWLDDFNCYDRQECVATEENPEVYFCCCEGNFCNEKFSYFPQMEVT |
| | additional aa at N-terminus | QPTSNPVTPKPP |
| 870 | Hybrid hu-ActRIIB-ECD | RGEAETRECIYYNANWELERTNQSGLERCEGEQDKRLHCYASWRNSSGTIE |
| | (SEQ ID NO: 96) with 4 | LVKKGCWLDDFNCYDRQECVATEENPEVYFCCCEGNFCNEKFSYFPQMEVT |
| | additional aa at N-terminus | QPTSNPVTPKPP |
| 871 | Hybrid hu-ActRIIB-ECD | GRGEAETRECIYYNANWELERTNQSGLERCEGEQDKRLHCYASWRNSSGTI |
| | (SEQ ID NO: 96) with 5 | ELVKKGCWLDDFNCYDRQECVATEENPEVYFCCCEGNFCNEKFSYFPQMEV |
| | additional aa at N-terminus | TQPTSNPVTPKPP |
| 872 | Hybrid hu-ActRIIB-ECD | SGRGEAETRECIYYNANWELERTNQSGLERCEGEQDKRLHCYASWRNSSGT |
| | (SEQ ID NO: 96) with 6 | IELVKKGCWLDDFNCYDRQECVATEENPEVYFCCCEGNFCNEKFSYFPQME |
| | additional aa at N-terminus | VTQPTSNPVTPKPP |
| 873 | Hybrid hu-ActRIIB-ECD | AETRECIYYNANWELERTNQSGLERCEGDKDKRLHCYASWRNSSGTIELVK |
| | (SEQ ID NO: 97) with 1 | KGCWLDDFNCYDRQECVETEENPQVYFCCCEGNFCNEKFSYFPQMEVTQPT |
| | additional aa at N-terminus | SNPVTPKPP |
| 874 | Hybrid hu-ActRIIB-ECD | EAETRECIYYNANWELERTNQSGLERCEGDKDKRLHCYASWRNSSGTIELV |
| | (SEQ ID NO: 97) with 2 | KKGCWLDDFNCYDRQECVETEENPQVYFCCCEGNFCNEKFSYFPQMEVTQP |
| | additional aa at N-terminus | TSNPVTPKPP |
| 875 | Hybrid hu-ActRIIB-ECD | GEAETRECIYYNANWELERTNQSGLERCEGDKDKRLHCYASWRNSSGTIEL |
| | (SEQ ID NO: 97) with 3 | VKKGCWLDDFNCYDRQECVETEENPQVYFCCCEGNFCNEKFSYFPQMEVT |
| | additional aa at N-terminus | QPTSNPVTPKPP |
| 876 | Hybrid hu-ActRIIB-ECD | RGEAETRECIYYNANWELERTNQSGLERCEGDKDKRLHCYASWRNSSGTIE |
| | (SEQ ID NO: 97) with 4 | LVKKGCWLDDFNCYDRQECVETEENPQVYFCCCEGNFCNEKFSYFPQMEVT |
| | additional aa at N-terminus | QPTSNPVTPKPP |
| 877 | Hybrid hu-ActRIIB-ECD | GRGEAETRECIYYNANWELERTNQSGLERCEGDKDKRLHCYASWRNSSGTI |
| | (SEQ ID NO: 97) with 5 | ELVKKGCWLDDFNCYDRQECVETEENPQVYFCCCEGNFCNEKFSYFPQMEV |
| | additional aa at N-terminus | TQPTSNPVTPKPP |
| 878 | Hybrid hu-ActRIIB-ECD | SGRGEAETRECIYYNANWELERTNQSGLERCEGDKDKRLHCYASWRNSSGT |
| | (SEQ ID NO: 97) with 6 | IELVKKGCWLDDFNCYDRQECVETEENPQVYFCCCEGNFCNEKFSYFPQME |
| | additional aa at N-terminus | VTQPTSNPVTPKPP |
| 879 | Hybrid hu-ActRIIB-ECD | AETRECIYYNANWELERTNQSGLERCEGEKDKRLHCYASWRNSSGTIELVK |
| | (SEQ ID NO: 98) with 1 | KGCWLDDFNCYDRQECVAKEENPQVYFCCCEGNFCNEKFSYFPQMEVTQP |
| | additional aa at N-terminus | TSNPVTPKPP |
| 880 | Hybrid hu-ActRIIB-ECD | EAETRECIYYNANWELERTNQSGLERCEGEKDKRLHCYASWRNSSGTIELV |
| | (SEQ ID NO: 98) with 2 | KKGCWLDDFNCYDRQECVAKEENPQVYFCCCEGNFCNEKFSYFPQMEVTQ |
| | additional aa at N-terminus | PTSNPVTPKPP |
| 881 | Hybrid hu-ActRIIB-ECD | GEAETRECIYYNANWELERTNQSGLERCEGEKDKRLHCYASWRNSSGTIEL |
| | (SEQ ID NO: 98) with 3 | VKKGCWLDDFNCYDRQECVAKEENPQVYFCCCEGNFCNEKFSYFPQMEVT |
| | additional aa at N-terminus | QPTSNPVTPKPP |
| 882 | Hybrid hu-ActRIIB-ECD | RGEAETRECIYYNANWELERTNQSGLERCEGEKDKRLHCYASWRNSSGTIE |
| | (SEQ ID NO: 98) with 4 | LVKKGCWLDDFNCYDRQECVAKEENPQVYFCCCEGNFCNEKFSYFPQMEV |
| | additional aa at N-terminus | TQPTSNPVTPKPP |
| 883 | Hybrid hu-ActRIIB-ECD | GRGEAETRECIYYNANWELERTNQSGLERCEGEKDKRLHCYASWRNSSGTI |
| | (SEQ ID NO: 98) with 5 | ELVKKGCWLDDFNCYDRQECVAKEENPQVYFCCCEGNFCNEKFSYFPQME |
| | additional aa at N-terminus | VTQPTSNPVTPKPP |
| 884 | Hybrid hu-ActRIIB-ECD | SGRGEAETRECIYYNANWELERTNQSGLERCEGEKDKRLHCYASWRNSSGT |
| | (SEQ ID NO: 98) with 6 | IELVKKGCWLDDFNCYDRQECVAKEENPQVYFCCCEGNFCNEKFSYFPQME |
| | additional aa at N-terminus | VTQPTSNPVTPKPP |
| 885 | Hybrid hu-ActRIIB-ECD | AETRECIYYNANWELERTNQSGLERCEGDQDKRLHCYASWRNSSGTIELVK |
| | (SEQ ID NO: 99) with 1 | KGCWLDDFNCYDRQECVATKENPQVYFCCCEGNFCNEKFSYFPQMEVTQP |
| | additional aa at N-terminus | TSNPVTPKPP |
| 886 | Hybrid hu-ActRIIB-ECD | EAETRECIYYNANWELERTNQSGLERCEGDQDKRLHCYASWRNSSGTIELV |
| | (SEQ ID NO: 99) with 2 | KKGCWLDDFNCYDRQECVATKENPQVYFCCCEGNFCNEKFSYFPQMEVTQ |
| | additional aa at N-terminus | PTSNPVTPKPP |
| 887 | Hybrid hu-ActRIIB-ECD | GEAETRECIYYNANWELERTNQSGLERCEGDQDKRLHCYASWRNSSGTIEL |
| | (SEQ ID NO: 99) with 3 | VKKGCWLDDFNCYDRQECVATKENPQVYFCCCEGNFCNEKFSYFPQMEVT |
| | additional aa at N-terminus | QPTSNPVTPKPP |
| 888 | Hybrid hu-ActRIIB-ECD | RGEAETRECIYYNANWELERTNQSGLERCEGDQDKRLHCYASWRNSSGTIE |
| | (SEQ ID NO: 99) with 4 | LVKKGCWLDDFNCYDRQECVATKENPQVYFCCCEGNFCNEKFSYFPQMEV |
| | additional aa at N-terminus | TQPTSNPVTPKPP |
| 889 | Hybrid hu-ActRIIB-ECD | GRGEAETRECIYYNANWELERTNQSGLERCEGDQDKRLHCYASWRNSSGTI |
| | (SEQ ID NO: 99) with 5 | ELVKKGCWLDDFNCYDRQECVATKENPQVYFCCCEGNFCNEKFSYFPQME |
| | additional aa at N-terminus | VTQPTSNPVTPKPP |
| 890 | Hybrid hu-ActRIIB-ECD | SGRGEAETRECIYYNANWELERTNQSGLERCEGDQDKRLHCYASWRNSSGT |
| | (SEQ ID NO: 99) with 6 | IELVKKGCWLDDFNCYDRQECVATKENPQVYFCCCEGNFCNEKFSYFPQME |
| | additional aa at N-terminus | VTQPTSNPVTPKPP |
| 891 | Hybrid hu-ActRIIB-ECD | AETRECIYYNANWELERTNQSGLERCEGDKDKRLHCYASWRNSSGTIELVK |
| | (SEQ ID NO: 100) with 1 | QGCWLDDFNCYDRQECVAKKENPQVYFCCCEGNFCNEKFSYFPQMEVTQP |
| | additional aa at N-terminus | TSNPVTPKPP |
| 892 | Hybrid hu-ActRIIB-ECD | EAETRECIYYNANWELERTNQSGLERCEGDKDKRLHCYASWRNSSGTIELV |
| | (SEQ ID NO: 100) with 2 | KQGCWLDDFNCYDRQECVAKKENPQVYFCCCEGNFCNEKFSYFPQMEVTQ |
| | additional aa at N-terminus | PTSNPVTPKPP |
| 893 | Hybrid hu-ActRIIB-ECD | GEAETRECIYYNANWELERTNQSGLERCEGDKDKRLHCYASWRNSSGTIEL |
| | (SEQ ID NO: 100) with 3 | VKQGCWLDDFNCYDRQECVAKKENPQVYFCCCEGNFCNEKFSYFPQMEVT |
| | additional aa at N-terminus | QPTSNPVTPKPP |
| 894 | Hybrid hu-ActRIIB-ECD | RGEAETRECIYYNANWELERTNQSGLERCEGDKDKRLHCYASWRNSSGTIE |
| | (SEQ ID NO: 100) with 4 | LVKQGCWLDDFNCYDRQECVAKKENPQVYFCCCEGNFCNEKFSYFPQMEV |
| | additional aa at N-terminus | TQPTSNPVTPKPP |
| 895 | Hybrid hu-ActRIIB-ECD | GRGEAETRECIYYNANWELERTNQSGLERCEGDKDKRLHCYASWRNSSGTI |
| | (SEQ ID NO: 100) with 5 | ELVKQGCWLDDFNCYDRQECVAKKENPQVYFCCCEGNFCNEKFSYFPQME |
| | additional aa at N-terminus | VTQPTSNPVTPKPP |
| 896 | Hybrid hu-ActRIIB-ECD | SGRGEAETRECIYYNANWELERTNQSGLERCEGDKDKRLHCYASWRNSSGT |
| | (SEQ ID NO: 100) with 6 | IELVKQGCWLDDFNCYDRQECVAKKENPQVYFCCCEGNFCNEKFSYFPQME |
| | additional aa at N-terminus | VTQPTSNPVTPKPP |
| 897 | Hybrid hu-ActRIIB-ECD | AETRECIYYNANWELERTNQSGLERCEGDKDKRLHCYASWRNSSGTIEIVK |
| | (SEQ ID NO: 101) with 1 | QGCWLDDFNCYDRQECVAEKENPQVYFCCCEGNFCNEKFSYFPQMEVTQP |
| | additional aa at N-terminus | TSNPVTPKPP |
| 898 | Hybrid hu-ActRIIB-ECD | EAETRECIYYNANWELERTNQSGLERCEGDKDKRLHCYASWRNSSGTIEIVK |
| | (SEQ ID NO: 101) with 2 | QGCWLDDFNCYDRQECVAEKENPQVYFCCCEGNFCNEKFSYFPQMEVTQP |
| | additional aa at N-terminus | TSNPVTPKPP |
| 899 | Hybrid hu-ActRIIB-ECD | GEAETRECIYYNANWELERTNQSGLERCEGDKDKRLHCYASWRNSSGTIEIV |
| | (SEQ ID NO: 101) with 3 | KQGCWLDDFNCYDRQECVAEKENPQVYFCCCEGNFCNEKFSYFPQMEVTQ |
| | additional aa at N-terminus | PTSNPVTPKPP |
| 900 | Hybrid hu-ActRIIB-ECD | RGEAETRECIYYNANWELERTNQSGLERCEGDKDKRLHCYASWRNSSGTIEI |
| | (SEQ ID NO: 101) with 4 | VKQGCWLDDFNCYDRQECVAEKENPQVYFCCCEGNFCNEKFSYFPQMEVT |
| | additional aa at N-terminus | QPTSNPVTPKPP |
| 901 | Hybrid hu-ActRIIB-ECD | GRGEAETRECIYYNANWELERTNQSGLERCEGDKDKRLHCYASWRNSSGTI |
| | (SEQ ID NO: 101) with 5 | EIVKQGCWLDDFNCYDRQECVAEKENPQVYFCCCEGNFCNEKFSYFPQMEV |
| | additional aa at N-terminus | TQPTSNPVTPKPP |
| 902 | Hybrid hu-ActRIIB-ECD | SGRGEAETRECIYYNANWELERTNQSGLERCEGDKDKRLHCYASWRNSSGT |
| | (SEQ ID NO: 101) with 6 | IEIVKQGCWLDDFNCYDRQECVAEKENPQVYFCCCEGNFCNEKFSYFPQME |
| | additional aa at N-terminus | VTQPTSNPVTPKPP |
| 903 | Hybrid hu-ActRIIB-ECD | AETRECIYYNANWELERTNQSGLERCYGDQDKRLHCYASWRNSSGSIEIVK |
| | (SEQ ID NO: 102) with 1 | QGCWLDDFNCYDRQECVAKKENPQVYFCCCEGNFCNEKFSYFPQMEVTQP |
| | additional aa at N-terminus | TSNPVTPKPP |
| 904 | Hybrid hu-ActRIIB-ECD | EAETRECIYYNANWELERTNQSGLERCYGDQDKRLHCYASWRNSSGSIEIVK |
| | (SEQ ID NO: 102) with 2 | QGCWLDDFNCYDRQECVAKKENPQVYFCCCEGNFCNEKFSYFPQMEVTQP |
| | additional aa at N-terminus | TSNPVTPKPP |
| 905 | Hybrid hu-ActRIIB-ECD | GEAETRECIYYNANWELERTNQSGLERCYGDQDKRLHCYASWRNSSGSIEIV |
| | (SEQ ID NO: 102) with 3 | KQGCWLDDFNCYDRQECVAKKENPQVYFCCCEGNFCNEKFSYFPQMEVTQ |
| | additional aa at N-terminus | PTSNPVTPKPP |
| 906 | Hybrid hu-ActRIIB-ECD | RGEAETRECIYYNANWELERTNQSGLERCYGDQDKRLHCYASWRNSSGSIEI |
| | (SEQ ID NO: 102) with 4 | VKQGCWLDDFNCYDRQECVAKKENPQVYFCCCEGNFCNEKFSYFPQMEVT |
| | additional aa at N-terminus | QPTSNPVTPKPP |
| 907 | Hybrid hu-ActRIIB-ECD | GRGEAETRECIYYNANWELERTNQSGLERCYGDQDKRLHCYASWRNSSGSI |
| | (SEQ ID NO: 102) with 5 | EIVKQGCWLDDFNCYDRQECVAKKENPQVYFCCCEGNFCNEKFSYFPQME |
| | additional aa at N-terminus | VTQPTSNPVTPKPP |
| 908 | Hybrid hu-ActRIIB-ECD | SGRGEAETRECIYYNANWELERTNQSGLERCYGDQDKRLHCYASWRNSSGS |
| | (SEQ ID NO: 102) with 6 | IEIVKQGCWLDDFNCYDRQECVAKKENPQVYFCCCEGNFCNEKFSYFPQME |
| | additional aa at N-terminus | VTQPTSNPVTPKPP |
| 909 | Hybrid hu-ActRIIB-ECD | AETRECIYYNANWELERTNQSGLERCEGEKDKRRHCYASWRNSSGTIEIVKK |
| | (SEQ ID NO: 103) with 1 | GCWLDDFNCYDRQECVATKENPQVYFCCCEGNFCNEKFSYFPQMEVTQPTS |
| | additional aa at N-terminus | NPVTPKPP |
| 910 | Hybrid hu-ActRIIB-ECD | EAETRECIYYNANWELERTNQSGLERCEGEKDKRRHCYASWRNSSGTIEIVK |
| | (SEQ ID NO: 103) with 2 | KGCWLDDFNCYDRQECVATKENPQVYFCCCEGNFCNEKFSYFPQMEVTQP |
| | additional aa at N-terminus | TSNPVTPKPP |
| 911 | Hybrid hu-ActRIIB-ECD | GEAETRECIYYNANWELERTNQSGLERCEGEKDKRRHCYASWRNSSGTIEIV |
| | (SEQ ID NO: 103) with 3 | KKGCWLDDFNCYDRQECVATKENPQVYFCCCEGNFCNEKFSYFPQMEVTQ |
| | additional aa at N-terminus | PTSNPVTPKPP |
| 912 | Hybrid hu-ActRIIB-ECD | RGEAETRECIYYNANWELERTNQSGLERCEGEKDKRRHCYASWRNSSGTIEI |
| | (SEQ ID NO: 103) with 4 | VKKGCWLDDFNCYDRQECVATKENPQVYFCCCEGNFCNEKFSYFPQMEVT |
| | additional aa at N-terminus | QPTSNPVTPKPP |
| 913 | Hybrid hu-ActRIIB-ECD | GRGEAETRECIYYNANWELERTNQSGLERCEGEKDKRRHCYASWRNSSGTI |
| | (SEQ ID NO: 103) with 5 | EIVKKGCWLDDFNCYDRQECVATKENPQVYFCCCEGNFCNEKFSYFPQMEV |
| | additional aa at N-terminus | TQPTSNPVTPKPP |
| 914 | Hybrid hu-ActRIIB-ECD | SGRGEAETRECIYYNANWELERTNQSGLERCEGEKDKRRHCYASWRNSSGT |
| | (SEQ ID NO: 103) with 5 | IEIVKKGCWLDDENCYDRQECVATKENPQVYFCCCEGNFCNEKFSYFPQME |
| | additional aa at N-terminus | VTQPTSNPVTPKPP |
| 915 | Hybrid hu-ActRIIB-ECD | AETRECIYYNANWELERTNQSGLERCYGDQDKRRHCYASWRNSSGTIELVK |
| | (SEQ ID NO: 104) with 1 | KGCWLDDFNCYDRQECVATEENPEVYFCCCEGNFCNEKFSYFPQMEVTQPT |
| | additional aa at N-terminus | SNPVTPKPP |
| 916 | Hybrid hu-ActRIIB-ECD | EAETRECIYYNANWELERINQSGLERCYGDQDKRRHCYASWRNSSGTIELV |
| | (SEQ ID NO: 104) with 2 | KKGCWLDDFNCYDRQECVATEENPEVYFCCCEGNFCNEKFSYFPQMEVTQP |
| | additional aa at N-terminus | TSNPVTPKPP |
| 917 | Hybrid hu-ActRIIB-ECD | GEAETRECIYYNANWELERTNQSGLERCYGDQDKRRHCYASWRNSSGTIEL |
| | (SEQ ID NO: 104) with 3 | VKKGCWLDDFNCYDRQECVATEENPEVYFCCCEGNFCNEKFSYFPQMEVT |
| | additional aa at N-terminus | QPTSNPVTPKPP |
| 918 | Hybrid hu-ActRIIB-ECD | RGEAETRECIYYNANWELERTNQSGLERCYGDQDKRRHCYASWRNSSGTIE |
| | (SEQ ID NO: 104) with 4 | LVKKGCWLDDFNCYDRQECVATEENPEVYFCCCEGNFCNEKFSYFPQMEVT |
| | additional aa at N-terminus | QPTSNPVTPKPP |
| 919 | Hybrid hu-ActRIIB-ECD | GRGEAETRECIYYNANWELERTNQSGLERCYGDQDKRRHCYASWRNSSGTI |
| | (SEQ ID NO: 104) with 5 | ELVKKGCWLDDFNCYDRQECVATEENPEVYFCCCEGNFCNEKFSYFPQMEV |
| | additional aa at N-terminus | TQPTSNPVTPKPP |
| 920 | Hybrid hu-ActRIIB-ECD | SGRGEAETRECIYYNANWELERTNQSGLERCYGDQDKRRHCYASWRNSSG |
| | (SEQ ID NO: 104) with 6 | TIELVKKGCWLDDFNCYDRQECVATEENPEVYFCCCEGNFCNEKFSYFPQM |
| | additional aa at N-terminus | EVTQPTSNPVTPKPP |
| 921 | Hybrid hu-ActRIIB-ECD | AETRECIYYNANWELERTNQSGLERCEGEQDKRRHCYASWRNSSGTIELVK |
| | (SEQ ID NO: 105) with 1 | KGCWLDDFNCYDRQECVATEENPQVYFCCCEGNFCNEKFSYFPQMEVTQPT |
| | additional aa at N-terminus | SNPVTPKPP |
| 922 | Hybrid hu-ActRIIB-ECD | EAETRECIYYNANWELERTNQSGLERCEGEQDKRRHCYASWRNSSGTIELV |
| | (SEQ ID NO: 105) with 2 | KKGCWLDDFNCYDRQECVATEENPQVYFCCCEGNFCNEKFSYFPQMEVTQ |
| | additional aa at N-terminus | PTSNPVTPKPP |
| 923 | Hybrid hu-ActRIIB-ECD | GEAETRECIYYNANWELERTNQSGLERCEGEQDKRRHCYASWRNSSGTIEL |
| | (SEQ ID NO: 105) with 3 | VKKGCWLDDFNCYDRQECVATEENPQVYFCCCEGNFCNEKFSYFPQMEVT |
| | additional aa at N-terminus | QPTSNPVTPKPP |
| 924 | Hybrid hu-ActRIIB-ECD | RGEAETRECIYYNANWELERTNQSGLERCEGEQDKRRHCYASWRNSSGTIE |
| | (SEQ ID NO: 105) with 4 | LVKKGCWLDDFNCYDRQECVATEENPQVYFCCCEGNFCNEKFSYFPQMEV |
| | additional aa at N-terminus | TQPTSNPVTPKPP |
| 925 | Hybrid hu-ActRIIB-ECD | GRGEAETRECIYYNANWELERTNQSGLERCEGEQDKRRHCYASWRNSSGTI |
| | (SEQ ID NO: 105) with 5 | ELVKKGCWLDDFNCYDRQECVATEENPQVYFCCCEGNFCNEKFSYFPQME |
| | additional aa at N-terminus | VTQPTSNPVTPKPP |
| 926 | Hybrid hu-ActRIIB-ECD | SGRGEAETRECIYYNANWELERTNQSGLERCEGEQDKRRHCYASWRNSSGT |
| | (SEQ ID NO: 105) with 6 | IELVKKGCWLDDFNCYDRQECVATEENPQVYFCCCEGNFCNEKFSYFPQME |
| | additional aa at N-terminus | VTQPTSNPVTPKPP |
| 927 | Hybrid hu-ActRIIB-ECD | AETRECIYYNANWELERTNQSGLERCYGEQDKRLHCYASWRNSSGSIEIVKK |
| | (SEQ ID NO: 106) with 1 | GCWLDDFNCYDRTDCVATEENPQVYFCCCEGNFCNEKFSYFPQMEVTQPTS |
| | additional aa at N-terminus | NPVTPKPP |
| 928 | Hybrid hu-ActRIIB-ECD | EAETRECIYYNANWELERTNQSGLERCYGEQDKRLHCYASWRNSSGSIEIVK |
| | (SEQ ID NO: 106) with 2 | KGCWLDDFNCYDRTDCVATEENPQVYFCCCEGNFCNEKFSYFPQMEVTQPT |
| | additional aa at N-terminus | SNPVTPKPP |
| 929 | Hybrid hu-ActRIIB-ECD | GEAETRECIYYNANWELERTNQSGLERCYGEQDKRLHCYASWRNSSGSIEIV |
| | (SEQ ID NO: 106) with 3 | KKGCWLDDFNCYDRTDCVATEENPQVYFCCCEGNFCNEKFSYFPQMEVTQ |
| | additional aa at N-terminus | PTSNPVTPKPP |
| 930 | Hybrid hu-ActRIIB-ECD | RGEAETRECIYYNANWELERTNQSGLERCYGEQDKRLHCYASWRNSSGSIEI |
| | (SEQ ID NO: 106) with 4 | VKKGCWLDDFNCYDRTDCVATEENPQVYFCCCEGNFCNEKFSYFPQMEVT |
| | additional aa at N-terminus | QPTSNPVTPKPP |
| 931 | Hybrid hu-ActRIIB-ECD | GRGEAETRECIYYNANWELERTNQSGLERCYGEQDKRLHCYASWRNSSGSI |
| | (SEQ ID NO: 106) with 5 | EIVKKGCWLDDFNCYDRTDCVATEENPQVYFCCCEGNFCNEKFSYFPQMEV |
| | additional aa at N-terminus | TQPTSNPVTPKPP |
| 932 | Hybrid hu-ActRIIB-ECD | SGRGEAETRECIYYNANWELERTNQSGLERCYGEQDKRLHCYASWRNSSGS |
| | (SEQ ID NO: 106) with 6 | IEIVKKGCWLDDFNCYDRTDCVATEENPQVYFCCCEGNFCNEKFSYFPQME |
| | additional aa at N-terminus | VTQPTSNPVTPKPP |
| 933 | Hybrid hu-ActRIIB-ECD | AETRECIYYNANWELERTNQSGLERCEGEQDKRRHCYASWRNSSGSIELVK |
| | (SEQ ID NO: 107) with 1 | KGCWLDDFNCYDRQECVAKEENPQVYFCCCEGNFCNEKFSYFPQMEVTQP |
| | additional aa at N-terminus | TSNPVTPKPP |
| 934 | Hybrid hu-ActRIIB-ECD | EAETRECIYYNANWELERINQSGLERCEGEQDKRRHCYASWRNSSGSIELV |
| | (SEQ ID NO: 107) with 2 | KKGCWLDDFNCYDRQECVAKEENPQVYFCCCEGNFCNEKFSYFPQMEVTQ |
| | additional aa at N-terminus | PTSNPVTPKPP |
| 935 | Hybrid hu-ActRIIB-ECD | GEAETRECIYYNANWELERTNQSGLERCEGEQDKRRHCYASWRNSSGSIEL |
| | (SEQ ID NO: 107) with 3 | VKKGCWLDDFNCYDRQECVAKEENPQVYFCCCEGNFCNEKFSYFPQMEVT |
| | additional aa at N-terminus | QPTSNPVTPKPP |
| 936 | Hybrid hu-ActRIIB-ECD | RGEAETRECIYYNANWELERTNQSGLERCEGEQDKRRHCYASWRNSSGSIE |
| | (SEQ ID NO: 107) with 4 | LVKKGCWLDDFNCYDRQECVAKEENPQVYFCCCEGNFCNEKFSYFPQMEV |
| | additional aa at N-terminus | TQPTSNPVTPKPP |
| 937 | Hybrid hu-ActRIIB-ECD | GRGEAETRECIYYNANWELERTNQSGLERCEGEQDKRRHCYASWRNSSGSI |
| | (SEQ ID NO: 107) with 5 | ELVKKGCWLDDFNCYDRQECVAKEENPQVYFCCCEGNFCNEKFSYFPQME |
| | additional aa at N-terminus | VTQPTSNPVTPKPP |
| 938 | Hybrid hu-ActRIIB-ECD | SGRGEAETRECIYYNANWELERTNQSGLERCEGEQDKRRHCYASWRNSSGS |
| | (SEQ ID NO: 107) with 6 | IELVKKGCWLDDFNCYDRQECVAKEENPQVYFCCCEGNFCNEKFSYFPQME |
| | additional aa at N-terminus | VTQPTSNPVTPKPP |
| 939 | Hybrid hu-ActRIIB-ECD | AETRECIYYNANWELERTNQSGLERCEGEQDKRRHCYASWRNSSGTIEIVKK |
| | (SEQ ID NO: 108) with 1 | GCWLDDFNCYDRQECVAKEENPQVYFCCCEGNFCNEKFSYFPQMEVTQPTS |
| | additional aa at N-terminus | NPVTPKPP |
| 940 | Hybrid hu-ActRIIB-ECD | EAETRECIYYNANWELERTNQSGLERCEGEQDKRRHCYASWRNSSGTIEIVK |
| | (SEQ ID NO: 108) with 2 | KGCWLDDFNCYDRQECVAKEENPQVYFCCCEGNFCNEKFSYFPQMEVTQP |
| | additional aa at N-terminus | TSNPVTPKPP |
| 941 | Hybrid hu-ActRIIB-ECD | GEAETRECIYYNANWELERTNQSGLERCEGEQDKRRHCYASWRNSSGTIEIV |
| | (SEQ ID NO: 108) with 3 | KKGCWLDDFNCYDRQECVAKEENPQVYFCCCEGNFCNEKFSYFPQMEVTQ |
| | additional aa at N-terminus | PTSNPVTPKPP |
| 942 | Hybrid hu-ActRIIB-ECD | RGEAETRECIYYNANWELERTNQSGLERCEGEQDKRRHCYASWRNSSGTIEI |
| | (SEQ ID NO: 108) with 4 | VKKGCWLDDFNCYDRQECVAKEENPQVYFCCCEGNFCNEKFSYFPQMEVT |
| | additional aa at N-terminus | QPTSNPVTPKPP |
| 943 | Hybrid hu-ActRIIB-ECD | GRGEAETRECIYYNANWELERTNQSGLERCEGEQDKRRHCYASWRNSSGTI |
| | (SEQ ID NO: 108) with 5 | EIVKKGCWLDDFNCYDRQECVAKEENPQVYFCCCEGNFCNEKFSYFPQMEV |
| | additional aa at N-terminus | TQPTSNPVTPKPP |
| 944 | Hybrid hu-ActRIIB-ECD | SGRGEAETRECIYYNANWELERTNQSGLERCEGEQDKRRHCYASWRNSSGT |
| | (SEQ ID NO: 108) with 6 | IEIVKKGCWLDDFNCYDRQECVAKEENPQVYFCCCEGNFCNEKFSYFPQME |
| | additional aa at N-terminus | VTQPTSNPVTPKPP |
| 945 | Hybrid hu-ActRIIB-ECD | AETRECIYYNANWELERTNQSGLERCEGEQDKRRHCYASWRNSSGSIEIVKK |
| | (SEQ ID NO: 109) with 1 | GCWLDDFNCYDRQECVATKENPQVYFCCCEGNFCNEKFSYFPQMEVTQPTS |
| | additional aa at N-terminus | NPVTPKPP |
| 946 | Hybrid hu-ActRIIB-ECD | EAETRECIYYNANWELERTNQSGLERCEGEQDKRRHCYASWRNSSGSIEIVK |
| | (SEQ ID NO: 109) with 2 | KGCWLDDFNCYDRQECVATKENPQVYFCCCEGNFCNEKFSYFPQMEVTQP |
| | additional aa at N-terminus | TSNPVTPKPP |
| 947 | Hybrid hu-ActRIIB-ECD | GEAETRECIYYNANWELERTNQSGLERCEGEQDKRRHCYASWRNSSGSIEIV |
| | (SEQ ID NO: 109) with 3 | KKGCWLDDFNCYDRQECVATKENPQVYFCCCEGNFCNEKFSYFPQMEVTQ |
| | additional aa at N-terminus | PTSNPVTPKPP |
| 948 | Hybrid hu-ActRIIB-ECD | RGEAETRECIYYNANWELERTNQSGLERCEGEQDKRRHCYASWRNSSGSIEI |
| | (SEQ ID NO: 109) with 4 | VKKGCWLDDFNCYDRQECVATKENPQVYFCCCEGNFCNEKFSYFPQMEVT |
| | additional aa at N-terminus | QPTSNPVTPKPP |
| 949 | Hybrid hu-ActRIIB-ECD | GRGEAETRECIYYNANWELERTNQSGLERCEGEQDKRRHCYASWRNSSGSI |
| | (SEQ ID NO: 109) with 5 | EIVKKGCWLDDFNCYDRQECVATKENPQVYFCCCEGNFCNEKFSYFPQMEV |
| | additional aa at N-terminus | TQPTSNPVTPKPP |
| 950 | Hybrid hu-ActRIIB-ECD | SGRGEAETRECIYYNANWELERTNQSGLERCEGEQDKRRHCYASWRNSSGS |
| | (SEQ ID NO: 109) with 6 | IEIVKKGCWLDDFNCYDRQECVATKENPQVYFCCCEGNFCNEKFSYFPQME |
| | additional aa at N-terminus | VTQPTSNPVTPKPP |
| 951 | Hybrid hu-ActRIIB-ECD | AETRECIYYNANWELERTNQSGLERCEGDQDKRLHCYASWRNSSGTIEIVK |
| | (SEQ ID NO: 110) with 1 | KGCWLDDFNCYDRQECVATKENPQVYFCCCEGNFCNEKFSYFPQMEVTQP |
| | additional aa at N-terminus | TSNPVTPKPP |
| 952 | Hybrid hu-ActRIIB-ECD | EAETRECIYYNANWELERTNQSGLERCEGDQDKRLHCYASWRNSSGTIEIVK |
| | (SEQ ID NO: 110) with 2 | KGCWLDDFNCYDRQECVATKENPQVYFCCCEGNFCNEKFSYFPQMEVTQP |
| | additional aa at N-terminus | TSNPVTPKPP |
| 953 | Hybrid hu-ActRIIB-ECD | GEAETRECIYYNANWELERTNQSGLERCEGDQDKRLHCYASWRNSSGTIEIV |
| | (SEQ ID NO: 110) with 3 | KKGCWLDDFNCYDRQECVATKENPQVYFCCCEGNFCNEKFSYFPQMEVTQ |
| | additional aa at N-terminus | PTSNPVTPKPP |
| 954 | Hybrid hu-ActRIIB-ECD | RGEAETRECIYYNANWELERTNQSGLERCEGDQDKRLHCYASWRNSSGTIEI |
| | (SEQ ID NO: 110) with 4 | VKKGCWLDDFNCYDRQECVATKENPQVYFCCCEGNFCNEKFSYFPQMEVT |
| | additional aa at N-terminus | QPTSNPVTPKPP |
| 955 | Hybrid hu-ActRIIB-ECD | GRGEAETRECIYYNANWELERTNQSGLERCEGDQDKRLHCYASWRNSSGTI |
| | (SEQ ID NO: 110) with 5 | EIVKKGCWLDDFNCYDRQECVATKENPQVYFCCCEGNFCNEKFSYFPQMEV |
| | additional aa at N-terminus | TQPTSNPVTPKPP |
| 956 | Hybrid hu-ActRIIB-ECD | SGRGEAETRECIYYNANWELERTNQSGLERCEGDQDKRLHCYASWRNSSGT |
| | (SEQ ID NO: 110) with 6 | IEIVKKGCWLDDFNCYDRQECVATKENPQVYFCCCEGNFCNEKFSYFPQME |
| | additional aa at N-terminus | VTQPTSNPVTPKPP |
| 957 | Hybrid hu-ActRIIB-ECD | AETRECIYYNANWELERTNQSGLERCEGDQDKRLHCYASWRNSSGSIELVK |
| | (SEQ ID NO: 111) with 1 | KGCWLDDFNCYDRQECVATKENPQVYFCCCEGNFCNEKFSYFPQMEVTQP |
| | additional aa at N-terminus | TSNPVTPKPP |
| 958 | Hybrid hu-ActRIIB-ECD | EAETRECIYYNANWELERTNQSGLERCEGDQDKRLHCYASWRNSSGSIELV |
| | (SEQ ID NO: 111) with 2 | KKGCWLDDFNCYDRQECVATKENPQVYFCCCEGNFCNEKFSYFPQMEVTQ |
| | additional aa at N-terminus | PTSNPVTPKPP |
| 959 | Hybrid hu-ActRIIB-ECD | GEAETRECIYYNANWELERTNQSGLERCEGDQDKRLHCYASWRNSSGSIEL |
| | (SEQ ID NO: 111) with 3 | VKKGCWLDDFNCYDRQECVATKENPQVYFCCCEGNFCNEKFSYFPQMEVT |
| | additional aa at N-terminus | QPTSNPVTPKPP |
| 960 | Hybrid hu-ActRIIB-ECD | RGEAETRECIYYNANWELERTNQSGLERCEGDQDKRLHCYASWRNSSGSIE |
| | (SEQ ID NO: 111) with 4 | LVKKGCWLDDFNCYDRQECVATKENPQVYFCCCEGNFCNEKFSYFPQMEV |
| | additional aa at N-terminus | TQPTSNPVTPKPP |
| 961 | Hybrid hu-ActRIIB-ECD | GRGEAETRECIYYNANWELERTNQSGLERCEGDQDKRLHCYASWRNSSGSI |
| | (SEQ ID NO: 111) with 5 | ELVKKGCWLDDFNCYDRQECVATKENPQVYFCCCEGNFCNEKFSYFPQME |
| | additional aa at N-terminus | VTQPTSNPVTPKPP |
| 962 | Hybrid hu-ActRIIB-ECD | SGRGEAETRECIYYNANWELERTNQSGLERCEGDQDKRLHCYASWRNSSGS |
| | (SEQ ID NO: 111) with 6 | IELVKKGCWLDDFNCYDRQECVATKENPQVYFCCCEGNFCNEKFSYFPQME |
| | additional aa at N-terminus | VTQPTSNPVTPKPP |
| 963 | Hybrid hu-ActRIIB-ECD | AETRECIYYNANWELERTNQSGLERCEGDQDKRLHCYASWRNSSGTIELVK |
| | (SEQ ID NO: 112) with 1 | KGCWLDDFNCYDRQECVATKENPQVYFCCCEGNFCNEKFSYFPQMEVTQP |
| | additional aa at N-terminus | TSNPVTPKPP |
| 964 | Hybrid hu-ActRIIB-ECD | EAETRECIYYNANWELERTNQSGLERCEGDQDKRLHCYASWRNSSGTIELV |
| | (SEQ ID NO: 112) with 2 | KKGCWLDDFNCYDRQECVATKENPQVYFCCCEGNFCNEKFSYFPQMEVTQ |
| | additional aa at N-terminus | PTSNPVTPKPP |
| 965 | Hybrid hu-ActRIIB-ECD | GEAETRECIYYNANWELERTNQSGLERCEGDQDKRLHCYASWRNSSGTIEL |
| | (SEQ ID NO: 112) with 3 | VKKGCWLDDFNCYDRQECVATKENPQVYFCCCEGNFCNEKFSYFPQMEVT |
| | additional aa at N-terminus | QPTSNPVTPKPP |
| 966 | Hybrid hu-ActRIIB-ECD | RGEAETRECIYYNANWELERTNQSGLERCEGDQDKRLHCYASWRNSSGTIE |
| | (SEQ ID NO: 112) with 4 | LVKKGCWLDDFNCYDRQECVATKENPQVYFCCCEGNFCNEKFSYFPQMEV |
| | additional aa at N-terminus | TQPTSNPVTPKPP |
| 967 | Hybrid hu-ActRIIB-ECD | GRGEAETRECIYYNANWELERTNQSGLERCEGDQDKRLHCYASWRNSSGTI |
| | (SEQ ID NO: 112) with 5 | ELVKKGCWLDDFNCYDRQECVATKENPQVYFCCCEGNFCNEKFSYFPQME |
| | additional aa at N-terminus | VTQPTSNPVTPKPP |
| 968 | Hybrid hu-ActRIIB-ECD | SGRGEAETRECIYYNANWELERTNQSGLERCEGDQDKRLHCYASWRNSSGT |
| | (SEQ ID NO: 112) with 6 | IELVKKGCWLDDFNCYDRQECVATKENPQVYFCCCEGNFCNEKFSYFPQME |
| | additional aa at N-terminus | VTQPTSNPVTPKPP |
| 969 | Hybrid hu-ActRIIB-ECD | AETRECIYYNANWELERTNQSGLERCEGEQDKRLHCYASWRNSSGTIEIVKK |
| | (SEQ ID NO: 113) with 1 | GCWLDDFNCYDRQECVATKENPQVYFCCCEGNFCNEKFSYFPQMEVTQPTS |
| | additional aa at N-terminus | NPVTPKPP |
| 970 | Hybrid hu-ActRIIB-ECD | EAETRECIYYNANWELERTNQSGLERCEGEQDKRLHCYASWRNSSGTIEIVK |
| | (SEQ ID NO: 113) with 2 | KGCWLDDFNCYDRQECVATKENPQVYFCCCEGNFCNEKFSYFPQMEVTQP |
| | additional aa at N-terminus | TSNPVTPKPP |
| 971 | Hybrid hu-ActRIIB-ECD | GEAETRECIYYNANWELERTNQSGLERCEGEQDKRLHCYASWRNSSGTIEIV |
| | (SEQ ID NO: 113) with 3 | KKGCWLDDFNCYDRQECVATKENPQVYFCCCEGNFCNEKFSYFPQMEVTQ |
| | additional aa at N-terminus | PTSNPVTPKPP |
| 972 | Hybrid hu-ActRIIB-ECD | RGEAETRECIYYNANWELERTNQSGLERCEGEQDKRLHCYASWRNSSGTIEI |
| | (SEQ ID NO: 113) with 4 | VKKGCWLDDFNCYDRQECVATKENPQVYFCCCEGNFCNEKFSYFPQMEVT |
| | additional aa at N-terminus | QPTSNPVTPKPP |
| 973 | Hybrid hu-ActRIIB-ECD | GRGEAETRECIYYNANWELERTNQSGLERCEGEQDKRLHCYASWRNSSGTI |
| | (SEQ ID NO: 113) with 5 | EIVKKGCWLDDFNCYDRQECVATKENPQVYFCCCEGNFCNEKFSYFPQMEV |
| | additional aa at N-terminus | TQPTSNPVTPKPP |
| 974 | Hybrid hu-ActRIIB-ECD | SGRGEAETRECIYYNANWELERTNQSGLERCEGEQDKRLHCYASWRNSSGT |
| | (SEQ ID NO: 113) with 6 | IEIVKKGCWLDDFNCYDRQECVATKENPQVYFCCCEGNFCNEKFSYFPQME |
| | additional aa at N-terminus | VTQPTSNPVTPKPP |
| 975 | Hybrid hu-ActRIIB-ECD | AETRECIYYNANWELERTNQSGLERCEGEQDKRLHCYASWRNSSGTIELVK |
| | (SEQ ID NO: 114) with 1 | KGCWLDDFNCYDRQECVATKENPQVYFCCCEGNFCNEKFSYFPQMEVTQP |
| | additional aa at N-terminus | TSNPVTPKPP |
| 976 | Hybrid hu-ActRIIB-ECD | EAETRECIYYNANWELERTNQSGLERCEGEQDKRLHCYASWRNSSGTIELV |
| | (SEQ ID NO: 114) with 2 | KKGCWLDDFNCYDRQECVATKENPQVYFCCCEGNFCNEKFSYFPQMEVTQ |
| | additional aa at N-terminus | PTSNPVTPKPP |
| 977 | Hybrid hu-ActRIIB-ECD | GEAETRECIYYNANWELERTNQSGLERCEGEQDKRLHCYASWRNSSGTIEL |
| | (SEQ ID NO: 114) with 3 | VKKGCWLDDFNCYDRQECVATKENPQVYFCCCEGNFCNEKFSYFPQMEVT |
| | additional aa at N-terminus | QPTSNPVTPKPP |
| 978 | Hybrid hu-ActRIIB-ECD | RGEAETRECIYYNANWELERTNQSGLERCEGEQDKRLHCYASWRNSSGTIE |
| | (SEQ ID NO: 114) with 4 | LVKKGCWLDDFNCYDRQECVATKENPQVYFCCCEGNFCNEKFSYFPQMEV |
| | additional aa at N-terminus | TQPTSNPVTPKPP |
| 979 | Hybrid hu-ActRIIB-ECD | GRGEAETRECIYYNANWELERTNQSGLERCEGEQDKRLHCYASWRNSSGTI |
| | (SEQ ID NO: 114) with 5 | ELVKKGCWLDDFNCYDRQECVATKENPQVYFCCCEGNFCNEKFSYFPQME |
| | additional aa at N-terminus | VTQPTSNPVTPKPP |
| 980 | Hybrid hu-ActRIIB-ECD | SGRGEAETRECIYYNANWELERTNQSGLERCEGEQDKRLHCYASWRNSSGT |
| | (SEQ ID NO: 114) with 6 | IELVKKGCWLDDFNCYDRQECVATKENPQVYFCCCEGNFCNEKFSYFPQME |
| | additional aa at N-terminus | VTQPTSNPVTPKPP |
| 981 | Hybrid hu-ActRIIB-ECD | AETRECIYYNANWELERTNQSGLERCEGDQDKRLHCYASWRNSSGTIEIVK |
| | (SEQ ID NO: 115) with 1 | KGCWLDDFNCYDRQECVAKKENPQVYFCCCEGNFCNEKFSYFPQMEVTQP |
| | additional aa at N-terminus | TSNPVTPKPP |
| 982 | Hybrid hu-ActRIIB-ECD | EAETRECIYYNANWELERTNQSGLERCEGDQDKRLHCYASWRNSSGTIEIVK |
| | (SEQ ID NO: 115) with 2 | KGCWLDDFNCYDRQECVAKKENPQVYFCCCEGNFCNEKFSYFPQMEVTQP |
| | additional aa at N-terminus | TSNPVTPKPP |
| 983 | Hybrid hu-ActRIIB-ECD | GEAETRECIYYNANWELERTNQSGLERCEGDQDKRLHCYASWRNSSGTIEIV |
| | (SEQ ID NO: 115) with 3 | KKGCWLDDFNCYDRQECVAKKENPQVYFCCCEGNFCNEKFSYFPQMEVTQ |
| | additional aa at N-terminus | PTSNPVTPKPP |
| 984 | Hybrid hu-ActRIIB-ECD | RGEAETRECIYYNANWELERTNQSGLERCEGDQDKRLHCYASWRNSSGTIEI |
| | (SEQ ID NO: 115) with 4 | VKKGCWLDDFNCYDRQECVAKKENPQVYFCCCEGNFCNEKFSYFPQMEVT |
| | additional aa at N-terminus | QPTSNPVTPKPP |
| 985 | Hybrid hu-ActRIIB-ECD | GRGEAETRECIYYNANWELERTNQSGLERCEGDQDKRLHCYASWRNSSGTI |
| | (SEQ ID NO: 115) with 5 | EIVKKGCWLDDFNCYDRQECVAKKENPQVYFCCCEGNFCNEKFSYFPQME |
| | additional aa at N-terminus | VTQPTSNPVTPKPP |
| 986 | Hybrid hu-ActRIIB-ECD | SGRGEAETRECIYYNANWELERTNQSGLERCEGDQDKRLHCYASWRNSSGT |
| | (SEQ ID NO: 115) with 6 | IEIVKKGCWLDDFNCYDRQECVAKKENPQVYFCCCEGNFCNEKFSYFPQME |
| | additional aa at N-terminus | VTQPTSNPVTPKPP |
| 987 | Hybrid hu-ActRIIB-ECD | AETQECLFFNANWEKDRTNQTGVEPCYGDKDKRRHCFATWKNISGSIEIVK |
| | (SEQ ID NO: 116) with 1 | QGCWLDDINCYDRTDCVEKKDSPEVYFCCCEGNMCNERFTHLPEAGGPEVT |
| | additional aa at N-terminus | YEPPPTAPT |
| 988 | Hybrid hu-ActRIIB-ECD | EAETQECLFFNANWEKDRTNQTGVEPCYGDKDKRRHCFATWKNISGSIEIV |
| | (SEQ ID NO: 116) with 2 | KQGCWLDDINCYDRTDCVEKKDSPEVYFCCCEGNMCNERFTHLPEAGGPEV |
| | additional aa at N-terminus | TYEPPPTAPT |
| 989 | Hybrid hu-ActRIIB-ECD | GEAETQECLFFNANWEKDRTNQTGVEPCYGDKDKRRHCFATWKNISGSIEI |
| | (SEQ ID NO: 116) with 3 | VKQGCWLDDINCYDRTDCVEKKDSPEVYFCCCEGNMCNERFTHLPEAGGPE |
| | additional aa at N-terminus | VTYEPPPTAPT |
| 990 | Hybrid hu-ActRIIB-ECD | RGEAETQECLFFNANWEKDRTNQTGVEPCYGDKDKRRHCFATWKNISGSIEI |
| | (SEQ ID NO: 116) with 4 | VKQGCWLDDINCYDRTDCVEKKDSPEVYFCCCEGNMCNERFTHLPEAGGPE |
| | additional aa at N-terminus | VTYEPPPTAPT |
| 991 | Hybrid hu-ActRIIB-ECD | GRGEAETQECLFFNANWEKDRTNQTGVEPCYGDKDKRRHCFATWKNISGSI |
| | (SEQ ID NO: 116) with 5 | EIVKQGCWLDDINCYDRTDCVEKKDSPEVYFCCCEGNMCNERFTHLPEAGG |
| | additional aa at N-terminus | PEVTYEPPPTAPT |
| 992 | Hybrid hu-ActRIIB-ECD | SGRGEAETQECLFFNANWEKDRTNQTGVEPCYGDKDKRRHCFATWKNISGS |
| | (SEQ ID NO: 116) with 6 | IEIVKQGCWLDDINCYDRTDCVEKKDSPEVYFCCCEGNMCNERFTHLPEAG |
| | additional aa at N-terminus | GPEVTYEPPPTAPT |
| 993 | Hybrid hu-ActRIIB-ECD | AETRECIYYNANWELERTNQSGLERCYGDKDKRRHCYASWRNSSGTIEL VK |
| | (SEQ ID NO: 117) with 1 | KGCWLDDINCYDRQECVATKENPQVYFCCCEGNFCNERFTHLPEAGGPEVT |
| | additional aa at N-terminus | YEPPPTAPT |
| 994 | Hybrid hu-ActRIIB-ECD | EAETRECIYYNANWELERTNQSGLERCYGDKDKRRHCYASWRNSSGTIELV |
| | (SEQ ID NO: 117) with 2 | KKGCWLDDINCYDRQECVATKENPQVYFCCCEGNFCNERFTHLPEAGGPEV |
| | additional aa at N-terminus | TYEPPPTAPT |
| 995 | Hybrid hu-ActRIIB-ECD | GEAETRECIYYNANWELERTNQSGLERCYGDKDKRRHCYASWRNSSGTIEL |
| | (SEQ ID NO: 117) with 3 | VKKGCWLDDINCYDRQECVATKENPQVYFCCCEGNFCNERFTHLPEAGGPE |
| | additional aa at N-terminus | VTYEPPPTAPT |
| 996 | Hybrid hu-ActRIIB-ECD | RGEAETRECIYYNANWELERTNQSGLERCYGDKDKRRHCYASWRNSSGTIE |
| | (SEQ ID NO: 117) with 4 | LVKKGCWLDDINCYDRQECVATKENPQVYFCCCEGNFCNERFTHLPEAGGP |
| | additional aa at N-terminus | EVTYEPPPTAPT |
| 997 | Hybrid hu-ActRIIB-ECD | GRGEAETRECIYYNANWELERTNQSGLERCYGDKDKRRHCYASWRNSSGTI |
| | (SEQ ID NO: 117) with 5 | ELVKKGCWLDDINCYDRQECVATKENPQVYFCCCEGNFCNERFTHLPEAGG |
| | additional aa at N-terminus | PEVTYEPPPTAPT |
| 998 | Hybrid hu-ActRIIB-ECD | SGRGEAETRECIYYNANWELERTNQSGLERCYGDKDKRRHCYASWRNSSG |
| | (SEQ ID NO: 117) with 6 | TIELVKKGCWLDDINCYDRQECVATKENPQVYFCCCEGNFCNERFTHLPEA |
| | additional aa at N-terminus | GGPEVTYEPPPTAPT |
| 1000 | N19Q mutant of Hybrid hu- | AETRECIYYNANWELERTQQSGLERCYGDKDKRRHCYASWRNSSGTIELVK |
| | ActRIIB-ECD (SEQ ID NO: | KGCWLDDINCYDRTDCVEKKDSPEVYFCCCEGNFCNERFTHLPEAGGPEVT |
| | 3) with 1 additional aa at N- | YEPPPTAPT |
| | terminus | |
| 1001 | N20Q mutant of Hybrid hu- | EAETRECIYYNANWELERTQQSGLERCYGDKDKRRHCYASWRNSSGTIELV |
| | ActRIIB-ECD (SEQ ID NO: | KKGCWLDDINCYDRTDCVEKKDSPEVYFCCCEGNFCNERFTHLPEAGGPEV |
| | 3) with 2 additional aa at N- | TYEPPPTAPT |
| | terminus | |
| 1002 | N21Q mutant of Hybrid hu- | GEAETRECIYYNANWELERTQQSGLERCYGDKDKRRHCYASWRNSSGTIEL |
| | ActRIIB-ECD (SEQ ID NO: | VKKGCWLDDINCYDRTDCVEKKDSPEVYFCCCEGNFCNERFTHLPEAGGPE |
| | 3) with 3 additional aa at N- | VTYEPPPTAPT |
| | terminus | |
| 1003 | N22Q mutant of Hybrid hu- | RGEAETRECIYYNANWELERTQQSGLERCYGDKDKRRHCYASWRNSSGTIE |
| | ActRIIB-ECD (SEQ ID NO: | LVKKGCWLDDINCYDRTDCVEKKDSPEVYFCCCEGNFCNERFTHLPEAGGP |
| | 3) with 4 additional aa at N- | EVTYEPPPTAPT |
| | terminus | |
| 1004 | N23Q mutant of Hybrid hu- | GRGEAETRECIYYNANWELERTQQSGLERCYGDKDKRRHCYASWRNSSGTI |
| | ActRIIB-ECD (SEQ ID NO: | ELVKKGCWLDDINCYDRTDCVEKKDSPEVYFCCCEGNFCNERFTHLPEAGG |
| | 3) with 5 additional aa at N- | PEVTYEPPPTAPT |
| | terminus | |
| 1005 | N24Q mutant of Hybrid hu- | SGRGEAETRECIYYNANWELERTQQSGLERCYGDKDKRRHCYASWRNSSG |
| | ActRIIB-ECD (SEQ ID NO: | TIELVKKGCWLDDINCYDRTDCVEKKDSPEVYFCCCEGNFCNERFTHLPEAG |
| | 3) with 6 additional aa at N- | GPEVTYEPPPTAPT |
| | terminus | |
| 1006 | N19Q mutant of Hybrid hu- | AETRECIYYNANWELERTQQSGLERCYGDKDKRRHCYASWRNSSGTIELVK |
| | ActRIIB-ECD (SEQ ID NO: | KGCWLDDFNCYDRTDCVEKKDSPEVYFCCCEGNFCNERFTHLPEAGGPEVT |
| | 4) with 1 additional aa at N- | YEPPPTAPT |
| | terminus | |
| 1007 | N20Q mutant of Hybrid hu- | EAETRECIYYNANWELERTQQSGLERCYGDKDKRRHCYASWRNSSGTIELV |
| | ActRIIB-ECD (SEQ ID NO: | KKGCWLDDFNCYDRTDCVEKKDSPEVYFCCCEGNFCNERFTHLPEAGGPEV |
| | 4) with 2 additional aa at N- | TYEPPPTAPT |
| | terminus | |
| 1008 | N21Q mutant of Hybrid hu- | GEAETRECIYYNANWELERTQQSGLERCYGDKDKRRHCYASWRNSSGTIEL |
| | ActRIIB-ECD (SEQ ID NO: | VKKGCWLDDFNCYDRTDCVEKKDSPEVYFCCCEGNFCNERFTHLPEAGGPE |
| | 4) with 3 additional aa at N- | VTYEPPPTAPT |
| | terminus | |
| 1009 | N22Q mutant of Hybrid hu- | RGEAETRECIYYNANWELERTQQSGLERCYGDKDKRRHCYASWRNSSGTIE |
| | ActRIIB-ECD (SEQ ID NO: | LVKKGCWLDDFNCYDRTDCVEKKDSPEVYFCCCEGNFCNERFTHLPEAGGP |
| | 4) with 4 additional aa at N- | EVTYEPPPTAPT |
| | terminus | |
| 1010 | N23Q mutant of Hybrid hu- | GRGEAETRECIYYNANWELERTQQSGLERCYGDKDKRRHCYASWRNSSGTI |
| | ActRIIB-ECD (SEQ ID NO: | ELVKKGCWLDDFNCYDRTDCVEKKDSPEVYFCCCEGNFCNERFTHLPEAGG |
| | 4) with 5 additional aa at N- | PEVTYEPPPTAPT |
| | terminus | |
| 1011 | N24Q mutant of Hybrid hu- | SGRGEAETRECIYYNANWELERTQQSGLERCYGDKDKRRHCYASWRNSSG |
| | ActRIIB-ECD (SEQ ID NO: | TIELVKKGCWLDDFNCYDRTDCVEKKDSPEVYFCCCEGNFCNERFTHLPEA |
| | 4) with 6 additional aa at N- | GGPEVTYEPPPTAPT |
| | terminus | |
| 1012 | N19Q mutant of Hybrid hu- | AETRECIYYNANWELERTQQSGLERCEGEQDKRLHCYASWRNSSGTIELVK |
| | ActRIIB-ECD (SEQ ID NO: | KGCWLDDINCYDRTDCVEKKDSPEVYFCCCEGNFCNERFTHLPEAGGPEVT |
| | 5) with 1 additional aa at N- | YEPPPTAPT |
| | terminus | |
| 1013 | N20Q mutant of Hybrid hu- | EAETRECIYYNANWELERTQQSGLERCEGEQDKRLHCYASWRNSSGTIELV |
| | ActRIIB-ECD (SEQ ID NO: | KKGCWLDDINCYDRTDCVEKKDSPEVYFCCCEGNFCNERFTHLPEAGGPEV |
| | 5) with 2 additional aa at N- | TYEPPPTAPT |
| | terminus | |
| 1014 | N21Q mutant of Hybrid hu- | GEAETRECIYYNANWELERTQQSGLERCEGEQDKRLHCYASWRNSSGTIEL |
| | ActRIIB-ECD (SEQ ID NO: | VKKGCWLDDINCYDRTDCVEKKDSPEVYFCCCEGNFCNERFTHLPEAGGPE |
| | 5) with 3 additional aa at N- | VTYEPPPTAPT |
| | terminus | |
| 1015 | N22Q mutant of Hybrid hu- | RGEAETRECIYYNANWELERTQQSGLERCEGEQDKRLHCYASWRNSSGTIE |
| | ActRIIB-ECD (SEQ ID NO: | LVKKGCWLDDINCYDRTDCVEKKDSPEVYFCCCEGNFCNERFTHLPEAGGP |
| | 5) with 4 additional aa at N- | EVTYEPPPTAPT |
| | terminus | |
| 1016 | N23Q mutant of Hybrid hu- | GRGEAETRECIYYNANWELERTQQSGLERCEGEQDKRLHCYASWRNSSGTI |
| | ActRIIB-ECD (SEQ ID NO: | ELVKKGCWLDDINCYDRTDCVEKKDSPEVYFCCCEGNFCNERFTHLPEAGG |
| | 5) with 5 additional aa at N- | PEVTYEPPPTAPT |
| | terminus | |
| 1017 | N24Q mutant of Hybrid hu- | SGRGEAETRECIYYNANWELERTQQSGLERCEGEQDKRLHCYASWRNSSGT |
| | ActRIIB-ECD (SEQ ID NO: | IELVKKGCWLDDINCYDRTDCVEKKDSPEVYFCCCEGNFCNERFTHLPEAG |
| | 5) with 6 additional aa at N- | GPEVTYEPPPTAPT |
| | terminus | |
| 1018 | N19Q mutant of Hybrid hu- | AETRECIYYNANWELERTQQSGLERCEGEQDKRLHCYASWRNSSGTIELVK |
| | ActRIIB-ECD (SEQ ID NO: | KGCWLDDINCYDRTDCVEKKDSPQVYFCCCEGNFCNERFTHLPEAGGPEVT |
| | 6) with 1 additional aa at N- | YEPPPTAPT |
| | terminus | |
| 1019 | N20Q mutant of Hybrid hu- | EAETRECIYYNANWELERTQQSGLERCEGEQDKRLHCYASWRNSSGTIELV |
| | ActRIIB-ECD (SEQ ID NO: | KKGCWLDDINCYDRTDCVEKKDSPQVYFCCCEGNFCNERFTHLPEAGGPEV |
| | 6) with 2 additional aa at N- | TYEPPPTAPT |
| | terminus | |
| 1020 | N21Q mutant of Hybrid hu- | GEAETRECIYYNANWELERTQQSGLERCEGEQDKRLHCYASWRNSSGTIEL |
| | ActRIIB-ECD (SEQ ID NO: | VKKGCWLDDINCYDRTDCVEKKDSPQVYFCCCEGNFCNERFTHLPEAGGPE |
| | 6) with 3 additional aa at N- | VTYEPPPTAPT |
| | terminus | |
| 1021 | N22Q mutant of Hybrid hu- | RGEAETRECIYYNANWELERTQQSGLERCEGEQDKRLHCYASWRNSSGTIE |
| | ActRIIB-ECD (SEQ ID NO: | LVKKGCWLDDINCYDRTDCVEKKDSPQVYFCCCEGNFCNERFTHLPEAGGP |
| | 6) with 4 additional aa at N- | EVTYEPPPTAPT |
| | terminus | |
| 1022 | N23Q mutant of Hybrid hu- | GRGEAETRECIYYNANWELERTQQSGLERCEGEQDKRLHCYASWRNSSGTI |
| | ActRIIB-ECD (SEQ ID NO: | ELVKKGCWLDDINCYDRTDCVEKKDSPQVYFCCCEGNFCNERFTHLPEAGG |
| | 6) with 5 additional aa at N- | PEVTYEPPPTAPT |
| | terminus | |
| 1023 | N24Q mutant of Hybrid hu- | SGRGEAETRECIYYNANWELERTQQSGLERCEGEQDKRLHCYASWRNSSGT |
| | ActRIIB-ECD (SEQ ID NO: | IELVKKGCWLDDINCYDRTDCVEKKDSPQVYFCCCEGNFCNERFTHLPEAG |
| | 6) with 6 additional aa at N- | GPEVTYEPPPTAPT |
| | terminus | |
| 1024 | N19Q mutant of Hybrid hu- | AETRECIYYNANWELERTQQSGLERCEGEQDKRLHCYASWRNSSGTIELVK |
| | ActRIIB-ECD (SEQ ID NO: | KGCWLDDFNCYDRTDCVEKKDSPQVYFCCCEGNFCNERFTHLPEAGGPEVT |
| | 7) with 1 additional aa at N- | YEPPPTAPT |
| | terminus | |
| 1025 | N20Q mutant of Hybrid hu- | EAETRECIYYNANWELERTQQSGLERCEGEQDKRLHCYASWRNSSGTIELV |
| | ActRIIB-ECD (SEQ ID NO: | KKGCWLDDFNCYDRTDCVEKKDSPQVYFCCCEGNFCNERFTHLPEAGGPEV |
| | 7) with 2 additional aa at N- | TYEPPPTAPT |
| | terminus | |
| 1026 | N21Q mutant of Hybrid hu- | GEAETRECIYYNANWELERTQQSGLERCEGEQDKRLHCYASWRNSSGTIEL |
| | ActRIIB-ECD (SEQ ID NO: | VKKGCWLDDFNCYDRTDCVEKKDSPQVYFCCCEGNFCNERFTHLPEAGGPE |
| | 7) with 3 additional aa at N- | VTYEPPPTAPT |
| | terminus | |
| 1027 | N22Q mutant of Hybrid hu- | RGEAETRECIYYNANWELERTQQSGLERCEGEQDKRLHCYASWRNSSGTIE |
| | ActRIIB-ECD (SEQ ID NO: | LVKKGCWLDDFNCYDRTDCVEKKDSPQVYFCCCEGNFCNERFTHLPEAGGP |
| | 7) with 4 additional aa at N- | EVTYEPPPTAPT |
| | terminus | |
| 1028 | N23Q mutant of Hybrid hu- | GRGEAETRECIYYNANWELERTQQSGLERCEGEQDKRLHCYASWRNSSGTI |
| | ActRIIB-ECD (SEQ ID NO: | ELVKKGCWLDDFNCYDRTDCVEKKDSPQVYFCCCEGNFCNERFTHLPEAG |
| | 7) with 5 additional aa at N- | GPEVTYEPPPTAPT |
| | terminus | |
| 1029 | N24Q mutant of Hybrid hu- | SGRGEA |
| | ActRIIB-ECD (SEQ ID NO: | ETRECIYYNANWELERTQQSGLERCEGEQDKRLHCYASWRNSSGTIELVKK |
| | 7) with 6 additional aa at N- | GCWLDDFNCYDRTDCVEKKDSPQVYFCCCEGNFCNERFTHLPEAGGPEVTY |
| | terminus | EPPPTAPT |
| 1030 | N19Q mutant of Hybrid hu- | AETRECIYYNANWELERTQQSGLERCEGEQDKRLHCYASWRNSSGTIELVK |
| | ActRIIB-ECD (SEQ ID NO: | KGCWLDDFNCYDRTDCVEKKDSPEVYFCCCEGNFCNERFTHLPEAGGPEVT |
| | 8) with 1 additional aa at N- | YEPPPTAPT |
| | terminus | |
| 1031 | N20Q mutant of Hybrid hu- | EAETRECIYYNANWELERTQQSGLERCEGEQDKRLHCYASWRNSSGTIELV |
| | ActRIIB-ECD (SEQ ID NO: | KKGCWLDDFNCYDRTDCVEKKDSPEVYFCCCEGNFCNERFTHLPEAGGPEV |
| | 8) with 2 additional aa at N- | TYEPPPTAPT |
| | terminus | |
| 1032 | N21Q mutant of Hybrid hu- | GEAETRECIYYNANWELERTQQSGLERCEGEQDKRLHCYASWRNSSGTIEL |
| | ActRIIB-ECD (SEQ ID NO: | VKKGCWLDDFNCYDRTDCVEKKDSPEVYFCCCEGNFCNERFTHLPEAGGPE |
| | 8) with 3 additional aa at N- | VTYEPPPTAPT |
| | terminus | |
| 1033 | N22Q mutant of Hybrid hu- | RGEAETRECIYYNANWELERTQQSGLERCEGEQDKRLHCYASWRNSSGTIE |
| | ActRIIB-ECD (SEQ ID NO: | LVKKGCWLDDFNCYDRTDCVEKKDSPEVYFCCCEGNFCNERFTHLPEAGGP |
| | 8) with 4 additional aa at N- | EVTYEPPPTAPT |
| | terminus | |
| 1034 | N23Q mutant of Hybrid hu- | GRGEAETRECIYYNANWELERTQQSGLERCEGEQDKRLHCYASWRNSSGTI |
| | ActRIIB-ECD (SEQ ID NO: | ELVKKGCWLDDFNCYDRTDCVEKKDSPEVYFCCCEGNFCNERFTHLPEAGG |
| | 8) with 5 additional aa at N- | PEVTYEPPPTAPT |
| | terminus | |
| 1035 | N24Q mutant of Hybrid hu- | SGRGEAETRECIYYNANWELERTQQSGLERCEGEQDKRLHCYASWRNSSGT |
| | ActRIIB-ECD (SEQ ID NO: | IELVKKGCWLDDFNCYDRTDCVEKKDSPEVYFCCCEGNFCNERFTHLPEAG |
| | 8) with 6 additional aa at N- | GPEVTYEPPPTAPT |
| | terminus | |
| 1036 | N19Q mutant of Hybrid hu- | AETRECIYYNANWELERTQQSGLERCEGEQDKRLHCYASWRNSSGTIELVK |
| | ActRIIB-ECD (SEQ ID NO: | KGCWLDDFNCYDRQECVEKKDSPEVYFCCCEGNFCNERFTHLPEAGGPEVT |
| | 9) with 1 additional aa at N- | YEPPPTAPT |
| | terminus | |
| 1037 | N20Q mutant of Hybrid hu- | EAETRECIYYNANWELERTQQSGLERCEGEQDKRLHCYASWRNSSGTIELV |
| | ActRIIB-ECD (SEQ ID NO: | KKGCWLDDFNCYDRQECVEKKDSPEVYFCCCEGNFCNERFTHLPEAGGPEV |
| | 9) with 2 additional aa at N- | TYEPPPTAPT |
| | terminus | |
| 1038 | N21Q mutant of Hybrid hu- | GEAETRECIYYNANWELERTQQSGLERCEGEQDKRLHCYASWRNSSGTIEL |
| | ActRIIB-ECD (SEQ ID NO: | VKKGCWLDDFNCYDRQECVEKKDSPEVYFCCCEGNFCNERFTHLPEAGGPE |
| | 9) with 3 additional aa at N- | VTYEPPPTAPT |
| | terminus | |
| 1039 | N22Q mutant of Hybrid hu- | RGEAETRECIYYNANWELERTQQSGLERCEGEQDKRLHCYASWRNSSGTIE |
| | ActRIIB-ECD (SEQ ID NO: | LVKKGCWLDDFNCYDRQECVEKKDSPEVYFCCCEGNFCNERFTHLPEAGGP |
| | 9) with 4 additional aa at N- | EVTYEPPPTAPT |
| | terminus | |
| 1040 | N23Q mutant of Hybrid hu- | GRGEAETRECIYYNANWELERTQQSGLERCEGEQDKRLHCYASWRNSSGTI |
| | ActRIIB-ECD (SEQ ID NO: | ELVKKGCWLDDFNCYDRQECVEKKDSPEVYFCCCEGNFCNERFTHLPEAGG |
| | 9) with 5 additional aa at N- | PEVTYEPPPTAPT |
| | terminus | |
| 1041 | N24Q mutant of Hybrid hu- | SGRGEAETRECIYYNANWELERTQQSGLERCEGEQDKRLHCYASWRNSSGT |
| | ActRIIB-ECD (SEQ ID NO: | IELVKKGCWLDDFNCYDRQECVEKKDSPEVYFCCCEGNFCNERFTHLPEAG |
| | 9) with 6 additional aa at N- | GPEVTYEPPPTAPT |
| | terminus | |
| 1042 | N19Q mutant of Hybrid hu- | AETRECIYYNANWELERTQQSGLERCEGEQDKRLHCYASWRNSSGTIELVK |
| | ActRIIB-ECD (SEQ ID NO: | KGCWLDDFNCYDRQECVEKKDSPQVYFCCCEGNFCNERFTHLPEAGGPEVT |
| | 10) with 1 additional aa at N- | YEPPPTAPT |
| | terminus | |
| 1043 | N20Q mutant of Hybrid hu- | EAETRECIYYNANWELERTQQSGLERCEGEQDKRLHCYASWRNSSGTIELV |
| | ActRIIB-ECD (SEQ ID NO: | KKGCWLDDFNCYDRQECVEKKDSPQVYFCCCEGNFCNERFTHLPEAGGPEV |
| | 10) with 2 additional aa at N- | TYEPPPTAPT |
| | terminus | |
| 1044 | N21Q mutant of Hybrid hu- | GEAETRECIYYNANWELERTQQSGLERCEGEQDKRLHCYASWRNSSGTIEL |
| | ActRIIB-ECD (SEQ ID NO: | VKKGCWLDDFNCYDRQECVEKKDSPQVYFCCCEGNFCNERFTHLPEAGGPE |
| | 10) with 3 additional aa at N- | VTYEPPPTAPT |
| | terminus | |
| 1045 | N22Q mutant of Hybrid hu- | RGEAETRECIYYNANWELERTQQSGLERCEGEQDKRLHCYASWRNSSGTIE |
| | ActRIIB-ECD (SEQ ID NO: | LVKKGCWLDDFNCYDRQECVEKKDSPQVYFCCCEGNFCNERFTHLPEAGGP |
| | 10) with 4 additional aa at N- | EVTYEPPPTAPT |
| | terminus | |
| 1046 | N23Q mutant of Hybrid hu- | GRGEAETRECIYYNANWELERTQQSGLERCEGEQDKRLHCYASWRNSSGTI |
| | ActRIIB-ECD (SEQ ID NO: | ELVKKGCWLDDFNCYDRQECVEKKDSPQVYFCCCEGNFCNERFTHLPEAG |
| | 10) with 5 additional aa at N- | GPEVTYEPPPTAPT |
| | terminus | |
| 1047 | N24Q mutant of Hybrid hu- | SGRGEAETRECIYYNANWELERTQQSGLERCEGEQDKRLHCYASWRNSSGT |
| | ActRIIB-ECD (SEQ ID NO: | IELVKKGCWLDDFNCYDRQECVEKKDSPQVYFCCCEGNFCNERFTHLPEAG |
| | 10) with 6 additional aa at N- | GPEVTYEPPPTAPT |
| | terminus | |
| 1048 | N19Q mutant of Hybrid hu- | ATRECIYYNANWELERTQQSGLERCEGEQDKRLHCYASWRNSSGTIELVKK |
| | ActRIIB-ECD (SEQ ID NO: | GCWLDDINCYDRQECVEKKDSPEVYFCCCEGNFCNERFTHLPEAGGPEVTY |
| | 11) with 1 additional aa at N- | EPPPTAPT |
| | terminus | |
| 1049 | N20Q mutant of Hybrid hu- | EATRECIYYNANWELERTQQSGLERCEGEQDKRLHCYASWRNSSGTIELVK |
| | ActRIIB-ECD (SEQ ID NO: | KGCWLDDINCYDRQECVEKKDSPEVYFCCCEGNFCNERFTHLPEAGGPEVT |
| | 11) with 2 additional aa at N- | YEPPPTAPT |
| | terminus | |
| 1050 | N21Q mutant of Hybrid hu- | GEATRECIYYNANWELERTQQSGLERCEGEQDKRLHCYASWRNSSGTIELV |
| | ActRIIB-ECD (SEQ ID NO: | KKGCWLDDINCYDRQECVEKKDSPEVYFCCCEGNFCNERFTHLPEAGGPEV |
| | 11) with 3 additional aa at N- | TYEPPPTAPT |
| | terminus | |
| 1051 | N22Q mutant of Hybrid hu- | RGEATRECIYYNANWELERTQQSGLERCEGEQDKRLHCYASWRNSSGTIEL |
| | ActRIIB-ECD (SEQ ID NO: | VKKGCWLDDINCYDRQECVEKKDSPEVYFCCCEGNFCNERFTHLPEAGGPE |
| | 11) with 4 additional aa at N- | VTYEPPPTAPT |
| | terminus | |
| 1052 | N23Q mutant of Hybrid hu- | GRGEATRECIYYNANWELERTQQSGLERCEGEQDKRLHCYASWRNSSGTIE |
| | ActRIIB-ECD (SEQ ID NO: | LVKKGCWLDDINCYDRQECVEKKDSPEVYFCCCEGNFCNERFTHLPEAGGP |
| | 11) with 5 additional aa at N- | EVTYEPPPTAPT |
| | terminus | |
| 1053 | N24Q mutant of Hybrid hu- | SGRGEATRECIYYNANWELERTQQSGLERCEGEQDKRLHCYASWRNSSGTI |
| | ActRIIB-ECD (SEQ ID NO: | ELVKKGCWLDDINCYDRQECVEKKDSPEVYFCCCEGNFCNERFTHLPEAGG |
| | 11) with 6 additional aa at N- | PEVTYEPPPTAPT |
| | terminus | |
| 1054 | N19Q mutant of Hybrid hu- | AETRECIYYNANWELERTQQSGLERCEGEQDKRLHCYASWRNSSGTIELVK |
| | ActRIIB-ECD (SEQ ID NO: | KGCWLDDFNCYDRTDCVEKKDSPEVYFCCCEGNMCNERFTHLPEAGGPEV |
| | 12) with 1 additional aa at N- | TYEPPPTAPT |
| | terminus | |
| 1055 | N20Q mutant of Hybrid hu- | EAETRECIYYNANWELERTQQSGLERCEGEQDKRLHCYASWRNSSGTIELV |
| | ActRIIB-ECD (SEQ ID NO: | KKGCWLDDFNCYDRTDCVEKKDSPEVYFCCCEGNMCNERFTHLPEAGGPE |
| | 12) with 2 additional aa at N- | VTYEPPPTAPT |
| | terminus | |
| 1056 | N21Q mutant of Hybrid hu- | GEAETRECIYYNANWELERTQQSGLERCEGEQDKRLHCYASWRNSSGTIEL |
| | ActRIIB-ECD (SEQ ID NO: | VKKGCWLDDFNCYDRTDCVEKKDSPEVYFCCCEGNMCNERFTHLPEAGGP |
| | 12) with 3 additional aa at N- | EVTYEPPPTAPT |
| | terminus | |
| 1057 | N22Q mutant of Hybrid hu- | RGEAETRECIYYNANWELERTQQSGLERCEGEQDKRLHCYASWRNSSGTIE |
| | ActRIIB-ECD (SEQ ID NO: | LVKKGCWLDDFNCYDRTDCVEKKDSPEVYFCCCEGNMCNERFTHLPEAGG |
| | 12) with 4 additional aa at N- | PEVTYEPPPTAPT |
| | terminus | |
| 1058 | N23Q mutant of Hybrid hu- | GRGEAETRECIYYNANWELERTQQSGLERCEGEQDKRLHCYASWRNSSGTI |
| | ActRIIB-ECD (SEQ ID NO: | ELVKKGCWLDDFNCYDRTDCVEKKDSPEVYFCCCEGNMCNERFTHLPEAG |
| | 12) with 5 additional aa at N- | GPEVTYEPPPTAPT |
| | terminus | |
| 1059 | N24Q mutant of Hybrid hu- | SGRGEAETRECIYYNANWELERTQQSGLERCEGEQDKRLHCYASWRNSSGT |
| | ActRIIB-ECD (SEQ ID NO: | IELVKKGCWLDDFNCYDRTDCVEKKDSPEVYFCCCEGNMCNERFTHLPEAG |
| | 12) with 6 additional aa at N- | GPEVTYEPPPTAPT |
| | terminus | |
| 1060 | N19Q mutant of Hybrid hu- | AETRECIYYNANWELERTQQSGLERCEGDQDKRLHCYASWRNSSGTIELVK |
| | ActRIIB-ECD (SEQ ID NO: | KGCWLDDFNCYDRQECVEKKDSPEVYFCCCEGNMCNERFTHLPEAGGPEV |
| | 13) with 1 additional aa at N- | TYEPPPTAPT |
| | terminus | |
| 1061 | N20Q mutant of Hybrid hu- | EAETRECIYYNANWELERTQQSGLERCEGDQDKRLHCYASWRNSSGTIELV |
| | ActRIIB-ECD (SEQ ID NO: | KKGCWLDDFNCYDRQECVEKKDSPEVYFCCCEGNMCNERFTHLPEAGGPE |
| | 13) with 2 additional aa at N- | VTYEPPPTAPT |
| | terminus | |
| 1062 | N21Q mutant of Hybrid hu- | GEAETRECIYYNANWELERTQQSGLERCEGDQDKRLHCYASWRNSSGTIEL |
| | ActRIIB-ECD (SEQ ID NO: | VKKGCWLDDFNCYDRQECVEKKDSPEVYFCCCEGNMCNERFTHLPEAGGP |
| | 13) with 3 additional aa at N- | EVTYEPPPTAPT |
| | terminus | |
| 1063 | N22Q mutant of Hybrid hu- | RGEAETRECIYYNANWELERTQQSGLERCEGDQDKRLHCYASWRNSSGTIE |
| | ActRIIB-ECD (SEQ ID NO: | LVKKGCWLDDFNCYDRQECVEKKDSPEVYFCCCEGNMCNERFTHLPEAGG |
| | 13) with 4 additional aa at N- | PEVTYEPPPTAPT |
| | terminus | |
| 1064 | N23Q mutant of Hybrid hu- | GRGEAETRECIYYNANWELERTQQSGLERCEGDQDKRLHCYASWRNSSGTI |
| | ActRIIB-ECD (SEQ ID NO: | ELVKKGCWLDDFNCYDRQECVEKKDSPEVYFCCCEGNMCNERFTHLPEAG |
| | 13) with 5 additional aa at N- | GPEVTYEPPPTAPT |
| | terminus | |
| 1065 | N24Q mutant of Hybrid hu- | SGRGEAETRECIYYNANWELERTQQSGLERCEGDQDKRLHCYASWRNSSGT |
| | ActRIIB-ECD (SEQ ID NO: | IELVKKGCWLDDFNCYDRQECVEKKDSPEVYFCCCEGNMCNERFTHLPEAG |
| | 13) with 6 additional aa at N- | GPEVTYEPPPTAPT |
| | terminus | |
| 1066 | N19Q mutant of Hybrid hu- | AETQECIYYNANWEKDRTQQTGVEPCYGDKDKRRHCYASWRNSSGTIELV |
| | ActRIIB-ECD (SEQ ID NO: | KKGCWLDDFNCYDRQECVATEENPQVYFCCCEGNFCNERFTHLPEAGGPEV |
| | 14) with 1 additional aa at N- | TYEPPPTAPT |
| | terminus | |
| 1067 | N20Q mutant of Hybrid hu- | EAETQECIYYNANWEKDRTQQTGVEPCYGDKDKRRHCYASWRNSSGTIELV |
| | ActRIIB-ECD (SEQ ID NO: | KKGCWLDDFNCYDRQECVATEENPQVYFCCCEGNFCNERFTHLPEAGGPEV |
| | 14) with 2 additional aa at N- | TYEPPPTAPT |
| | terminus | |
| 1068 | N21Q mutant of Hybrid hu- | GEAETQECIYYNANWEKDRTQQTGVEPCYGDKDKRRHCYASWRNSSGTIEL |
| | ActRIIB-ECD (SEQ ID NO: | VKKGCWLDDFNCYDRQECVATEENPQVYFCCCEGNFCNERFTHLPEAGGPE |
| | 14) with 3 additional aa at N- | VTYEPPPTAPT |
| | terminus | |
| 1069 | N22Q mutant of Hybrid hu- | RGEAETQECIYYNANWEKDRTQQTGVEPCYGDKDKRRHCYASWRNSSGTI |
| | ActRIIB-ECD (SEQ ID NO: | ELVKKGCWLDDFNCYDRQECVATEENPQVYFCCCEGNFCNERFTHLPEAGG |
| | 14) with 4 additional aa at N- | PEVTYEPPPTAPT |
| | terminus | |
| 1070 | N23Q mutant of Hybrid hu- | GRGEAETQECIYYNANWEKDRTQQTGVEPCYGDKDKRRHCYASWRNSSGT |
| | ActRIIB-ECD (SEQ ID NO: | IELVKKGCWLDDFNCYDRQECVATEENPQVYFCCCEGNFCNERFTHLPEAG |
| | 14) with 5 additional aa at N- | GPEVTYEPPPTAPT |
| | terminus | |
| 1071 | N24Q mutant of Hybrid hu- | SGRGEAETQECIYYNANWEKDRTQQTGVEPCYGDKDKRRHCYASWRNSSG |
| | ActRIIB-ECD (SEQ ID NO: | TIELVKKGCWLDDFNCYDRQECVATEENPQVYFCCCEGNFCNERFTHLPEA |
| | 14) with 6 additional aa at N- | GGPEVTYEPPPTAPT |
| | terminus | |
| 1072 | N19Q mutant of Hybrid hu- | AETQECIYYNANWEKDRTQQTGVEPCEGDQDKRLHCYASWRNSSGTIELVK |
| | ActRIIB-ECD (SEQ ID NO: | KGCWLDDFNCYDRQECVATEENPQVYFCCCEGNFCNERFTHLPEAGGPEVT |
| | 15) with 1 additional aa at N- | YEPPPTAPT |
| | terminus | |
| 1073 | N20Q mutant of Hybrid hu- | EAETQECIYYNANWEKDRTQQTGVEPCEGDQDKRLHCYASWRNSSGTIELV |
| | ActRIIB-ECD (SEQ ID NO: | KKGCWLDDFNCYDRQECVATEENPQVYFCCCEGNFCNERFTHLPEAGGPEV |
| | 15) with 2 additional aa at N- | TYEPPPTAPT |
| | terminus | |
| 1074 | N21Q mutant of Hybrid hu- | GEAETQECIYYNANWEKDRTQQTGVEPCEGDQDKRLHCYASWRNSSGTIEL |
| | ActRIIB-ECD (SEQ ID NO: | VKKGCWLDDFNCYDRQECVATEENPQVYFCCCEGNFCNERFTHLPEAGGPE |
| | 15) with 3 additional aa at N- | VTYEPPPTAPT |
| | terminus | |
| 1075 | N22Q mutant of Hybrid hu- | RGEAETQECIYYNANWEKDRTQQTGVEPCEGDQDKRLHCYASWRNSSGTIE |
| | ActRIIB-ECD (SEQ ID NO: | LVKKGCWLDDFNCYDRQECVATEENPQVYFCCCEGNFCNERFTHLPEAGGP |
| | 15) with 4 additional aa at N- | EVTYEPPPTAPT |
| | terminus | |
| 1076 | N23Q mutant of Hybrid hu- | GRGEAETQECIYYNANWEKDRTQQTGVEPCEGDQDKRLHCYASWRNSSGTI |
| | ActRIIB-ECD (SEQ ID NO: | ELVKKGCWLDDFNCYDRQECVATEENPQVYFCCCEGNFCNERFTHLPEAGG |
| | 15) with 5 additional aa at N- | PEVTYEPPPTAPT |
| | terminus | |
| 1077 | N24Q mutant of Hybrid hu- | SGRGEAETQECIYYNANWEKDRTQQTGVEPCEGDQDKRLHCYASWRNSSG |
| | ActRIIB-ECD (SEQ ID NO: | TIELVKKGCWLDDFNCYDRQECVATEENPQVYFCCCEGNFCNERFTHLPEA |
| | 15) with 6 additional aa at N- | GGPEVTYEPPPTAPT |
| | terminus | |
| 1078 | N19Q mutant of Hybrid hu- | AETRECIYYNANWELERTQQSGLERCYGDKDKRRHCYASWRNSSGTIELVK |
| | ActRIIB-ECD (SEQ ID NO: | KGCWLDDFNCYDRQECVATEENPQVYFCCCEGNFCNERFTHLPEAGGPEVT |
| | 16) with 1 additional aa at N- | YEPPPTAPT |
| | terminus | |
| 1079 | N20Q mutant of Hybrid hu- | EAETRECIYYNANWELERTQQSGLERCYGDKDKRRHCYASWRNSSGTIELV |
| | ActRIIB-ECD (SEQ ID NO: | KKGCWLDDFNCYDRQECVATEENPQVYFCCCEGNFCNERFTHLPEAGGPEV |
| | 16) with 2 additional aa at N- | TYEPPPTAPT |
| | terminus | |
| 1080 | N21Q mutant of Hybrid hu- | GEAETRECIYYNANWELERTQQSGLERCYGDKDKRRHCYASWRNSSGTIEL |
| | ActRIIB-ECD (SEQ ID NO: | VKKGCWLDDFNCYDRQECVATEENPQVYFCCCEGNFCNERFTHLPEAGGPE |
| | 16) with 3 additional aa at N- | VTYEPPPTAPT |
| | terminus | |
| 1081 | N22Q mutant of Hybrid hu- | RGEAETRECIYYNANWELERTQQSGLERCYGDKDKRRHCYASWRNSSGTIE |
| | ActRIIB-ECD (SEQ ID NO: | LVKKGCWLDDFNCYDRQECVATEENPQVYFCCCEGNFCNERFTHLPEAGGP |
| | 16) with 4 additional aa at N- | EVTYEPPPTAPT |
| | terminus | |
| 1082 | N23Q mutant of Hybrid hu- | GRGEAETRECIYYNANWELERTQQSGLERCYGDKDKRRHCYASWRNSSGTI |
| | ActRIIB-ECD (SEQ ID NO: | ELVKKGCWLDDFNCYDRQECVATEENPQVYFCCCEGNFCNERFTHLPEAGG |
| | 16) with 5 additional aa at N- | PEVTYEPPPTAPT |
| | terminus | |
| 1083 | N24Q mutant of Hybrid hu- | SGRGEAETRECIYYNANWELERTQQSGLERCYGDKDKRRHCYASWRNSSG |
| | ActRIIB-ECD (SEQ ID NO: | TIELVKKGCWLDDFNCYDRQECVATEENPQVYFCCCEGNFCNERFTHLPEA |
| | 16) with 6 additional aa at N- | GGPEVTYEPPPTAPT |
| | terminus | |
| 1084 | N19Q mutant of Hybrid hu- | AETRECIYYNANWEKDRTQQTGVEPCEGDQDKRLHCYASWRNSSGTIELVK |
| | ActRIIB-ECD (SEQ ID NO: | KGCWLDDFNCYDRQECVATEENPQVYFCCCEGNFCNERFTHLPEAGGPEVT |
| | 17) with 1 additional aa at N- | YEPPPTAPT |
| | terminus | |
| 1085 | N20Q mutant of Hybrid hu- | EAETRECIYYNANWEKDRTQQTGVEPCEGDQDKRLHCYASWRNSSGTIELV |
| | ActRIIB-ECD (SEQ ID NO: | KKGCWLDDFNCYDRQECVATEENPQVYFCCCEGNFCNERFTHLPEAGGPEV |
| | 17) with 2 additional aa at N- | TYEPPPTAPT |
| | terminus | |
| 1086 | N21Q mutant of Hybrid hu- | GEAETRECIYYNANWEKDRTQQTGVEPCEGDQDKRLHCYASWRNSSGTIEL |
| | ActRIIB-ECD (SEQ ID NO: | VKKGCWLDDFNCYDRQECVATEENPQVYFCCCEGNFCNERFTHLPEAGGPE |
| | 17) with 3 additional aa at N- | VTYEPPPTAPT |
| | terminus | |
| 1087 | N22Q mutant of Hybrid hu- | RGEAETRECIYYNANWEKDRTQQTGVEPCEGDQDKRLHCYASWRNSSGTIE |
| | ActRIIB-ECD (SEQ ID NO: | LVKKGCWLDDFNCYDRQECVATEENPQVYFCCCEGNFCNERFTHLPEAGGP |
| | 17) with 4 additional aa at N- | EVTYEPPPTAPT |
| | terminus | |
| 1088 | N23Q mutant of Hybrid hu- | GRGEAETRECIYYNANWEKDRTQQTGVEPCEGDQDKRLHCYASWRNSSGTI |
| | ActRIIB-ECD (SEQ ID NO: | ELVKKGCWLDDFNCYDRQECVATEENPQVYFCCCEGNFCNERFTHLPEAGG |
| | 17) with 5 additional aa at N- | PEVTYEPPPTAPT |
| | terminus | |
| 1089 | N24Q mutant of Hybrid hu- | SGRGEAETRECIYYNANWEKDRTQQTGVEPCEGDQDKRLHCYASWRNSSG |
| | ActRIIB-ECD (SEQ ID NO: | TIELVKKGCWLDDFNCYDRQECVATEENPQVYFCCCEGNFCNERFTHLPEA |
| | 17) with 6 additional aa at N- | GGPEVTYEPPPTAPT |
| | terminus | |
| 1090 | N19Q mutant of Hybrid hu- | AETQECIYYNANWEKDRTQQTGVEPCEGDQDKRLHCYASWRNSSGTIELVK |
| | ActRIIB-ECD (SEQ ID NO: | KGCWLDDFNCYDRQECVATEENPQVYFCCCEGNFCNERFTHLPEAGGPEVT |
| | 18) with 1 additional aa at N- | YEPPPTAPT |
| | terminus | |
| 1091 | N20Q mutant of Hybrid hu- | EAETQECIYYNANWEKDRTQQTGVEPCEGDQDKRLHCYASWRNSSGTIELV |
| | ActRIIB-ECD (SEQ ID NO: | KKGCWLDDFNCYDRQECVATEENPQVYFCCCEGNFCNERFTHLPEAGGPEV |
| | 18) with 2 additional aa at N- | TYEPPPTAPT |
| | terminus | |
| 1092 | N21Q mutant of Hybrid hu- | GEAETQECIYYNANWEKDRTQQTGVEPCEGDQDKRLHCYASWRNSSGTIEL |
| | ActRIIB-ECD (SEQ ID NO: | VKKGCWLDDFNCYDRQECVATEENPQVYFCCCEGNFCNERFTHLPEAGGPE |
| | 18) with 3 additional aa at N- | VTYEPPPTAPT |
| | terminus | |
| 1093 | N22Q mutant of Hybrid hu- | RGEAETQECIYYNANWEKDRTQQTGVEPCEGDQDKRLHCYASWRNSSGTIE |
| | ActRIIB-ECD (SEQ ID NO: | LVKKGCWLDDFNCYDRQECVATEENPQVYFCCCEGNFCNERFTHLPEAGGP |
| | 18) with 4 additional aa at N- | EVTYEPPPTAPT |
| | terminus | |
| 1094 | N23Q mutant of Hybrid hu- | GRGEAETQECIYYNANWEKDRTQQTGVEPCEGDQDKRLHCYASWRNSSGTI |
| | ActRIIB-ECD (SEQ ID NO: | ELVKKGCWLDDFNCYDRQECVATEENPQVYFCCCEGNFCNERFTHLPEAGG |
| | 18) with 5 additional aa at N- | PEVTYEPPPTAPT |
| | terminus | |
| 1095 | N24Q mutant of Hybrid hu- | SGRGEAETQECIYYNANWEKDRTQQTGVEPCEGDQDKRLHCYASWRNSSG |
| | ActRIIB-ECD (SEQ ID NO: | TIELVKKGCWLDDFNCYDRQECVATEENPQVYFCCCEGNFCNERFTHLPEA |
| | 18) with 6 additional aa at N- | GGPEVTYEPPPTAPT |
| | terminus | |
| 1096 | N19Q mutant of Hybrid hu- | AETQECIYYNANWEKDRTQQTGLERCEGEQDKRLHCYASWRNSSGTIELVK |
| | ActRIIB-ECD (SEQ ID NO: | KGCWLDDFNCYDRQECVATEENPQVYFCCCEGNFCNERFTHLPEAGGPEVT |
| | 19) with 1 additional aa at N- | YEPPPTAPT |
| | terminus | |
| 1097 | N20Q mutant of Hybrid hu- | EAETQECIYYNANWEKDRTQQTGLERCEGEQDKRLHCYASWRNSSGTIELV |
| | ActRIIB-ECD (SEQ ID NO: | KKGCWLDDFNCYDRQECVATEENPQVYFCCCEGNFCNERFTHLPEAGGPEV |
| | 19) with 2 additional aa at N- | TYEPPPTAPT |
| | terminus | |
| 1098 | N21Q mutant of Hybrid hu- | GEAETQECIYYNANWEKDRTQQTGLERCEGEQDKRLHCYASWRNSSGTIEL |
| | ActRIIB-ECD (SEQ ID NO: | VKKGCWLDDFNCYDRQECVATEENPQVYFCCCEGNFCNERFTHLPEAGGPE |
| | 19) with 3 additional aa at N- | VTYEPPPTAPT |
| | terminus | |
| 1099 | N22Q mutant of Hybrid hu- | RGEAETQECIYYNANWEKDRTQQTGLERCEGEQDKRLHCYASWRNSSGTIE |
| | ActRIIB-ECD (SEQ ID NO: | LVKKGCWLDDFNCYDRQECVATEENPQVYFCCCEGNFCNERFTHLPEAGGP |
| | 19) with 4 additional aa at N- | EVTYEPPPTAPT |
| | terminus | |
| 1100 | N23Q mutant of Hybrid hu- | GRGEAETQECIYYNANWEKDRTQQTGLERCEGEQDKRLHCYASWRNSSGTI |
| | ActRIIB-ECD (SEQ ID NO: | ELVKKGCWLDDFNCYDRQECVATEENPQVYFCCCEGNFCNERFTHLPEAGG |
| | 19) with 5 additional aa at N- | PEVTYEPPPTAPT |
| | terminus | |
| 1101 | N24Q mutant of Hybrid hu- | SGRGEAETQECIYYNANWEKDRTQQTGLERCEGEQDKRLHCYASWRNSSG |
| | ActRIIB-ECD (SEQ ID NO: | TIELVKKGCWLDDFNCYDRQECVATEENPQVYFCCCEGNFCNERFTHLPEA |
| | 19) with 6 additional aa at N- | GGPEVTYEPPPTAPT |
| | terminus | |
| 1102 | N19Q mutant of Hybrid hu- | AETQECIYYNANWEKDRTQQSGLERCEGEQDKRLHCYASWRNSSGTIELVK |
| | ActRIIB-ECD (SEQ ID NO: | KGCWLDDFNCYDRQECVATEENPQVYFCCCEGNFCNERFTHLPEAGGPEVT |
| | 20) with 1 additional aa at N- | YEPPPTAPT |
| | terminus | |
| 1103 | N20Q mutant of Hybrid hu- | EAETQECIYYNANWEKDRTQQSGLERCEGEQDKRLHCYASWRNSSGTIELV |
| | ActRIIB-ECD (SEQ ID NO: | KKGCWLDDFNCYDRQECVATEENPQVYFCCCEGNFCNERFTHLPEAGGPEV |
| | 20) with 2 additional aa at N- | TYEPPPTAPT |
| | terminus | |
| 1104 | N21Q mutant of Hybrid hu- | GEAETQECIYYNANWEKDRTQQSGLERCEGEQDKRLHCYASWRNSSGTIEL |
| | ActRIIB-ECD (SEQ ID NO: | VKKGCWLDDFNCYDRQECVATEENPQVYFCCCEGNFCNERFTHLPEAGGPE |
| | 20) with 3 additional aa at N- | VTYEPPPTAPT |
| | terminus | |
| 1105 | N22Q mutant of Hybrid hu- | RGEAETQECIYYNANWEKDRTQQSGLERCEGEQDKRLHCYASWRNSSGTIE |
| | ActRIIB-ECD (SEQ ID NO: | LVKKGCWLDDFNCYDRQECVATEENPQVYFCCCEGNFCNERFTHLPEAGGP |
| | 20) with 4 additional aa at N- | EVTYEPPPTAPT |
| | terminus | |
| 1106 | N23Q mutant of Hybrid hu- | GRGEAETQECIYYNANWEKDRTQQSGLERCEGEQDKRLHCYASWRNSSGTI |
| | ActRIIB-ECD (SEQ ID NO: | ELVKKGCWLDDFNCYDRQECVATEENPQVYFCCCEGNFCNERFTHLPEAGG |
| | 20) with 5 additional aa at N- | PEVTYEPPPTAPT |
| | terminus | |
| 1107 | N24Q mutant of Hybrid hu- | SGRGEAETQECIYYNANWEKDRTQQSGLERCEGEQDKRLHCYASWRNSSG |
| | ActRIIB-ECD (SEQ ID NO: | TIELVKKGCWLDDFNCYDRQECVATEENPQVYFCCCEGNFCNERFTHLPEA |
| | 20) with 6 additional aa at N- | GGPEVTYEPPPTAPT |
| | terminus | |
| 1108 | N19Q mutant of Hybrid hu- | AETRECIYYNANWEKDRTQQSGLERCEGEQDKRLHCYASWRNSSGTIELVK |
| | ActRIIB-ECD (SEQ ID NO: | KGCWLDDFNCYDRQECVATEENPQVYFCCCEGNFCNERFTHLPEAGGPEVT |
| | 21) with 1 additional aa at N- | YEPPPTAPT |
| | terminus | |
| 1109 | N20Q mutant of Hybrid hu- | EAETRECIYYNANWEKDRTQQSGLERCEGEQDKRLHCYASWRNSSGTIELV |
| | ActRIIB-ECD (SEQ ID NO: | KKGCWLDDFNCYDRQECVATEENPQVYFCCCEGNFCNERFTHLPEAGGPEV |
| | 21) with 2 additional aa at N- | TYEPPPTAPT |
| | terminus | |
| 1110 | N21Q mutant of Hybrid hu- | GEAETRECIYYNANWEKDRTQQSGLERCEGEQDKRLHCYASWRNSSGTIEL |
| | ActRIIB-ECD (SEQ ID NO: | VKKGCWLDDFNCYDRQECVATEENPQVYFCCCEGNFCNERFTHLPEAGGPE |
| | 21) with 3 additional aa at N- | VTYEPPPTAPT |
| | terminus | |
| 1111 | N22Q mutant of Hybrid hu- | RGEAETRECIYYNANWEKDRTQQSGLERCEGEQDKRLHCYASWRNSSGTIE |
| | ActRIIB-ECD (SEQ ID NO: | LVKKGCWLDDFNCYDRQECVATEENPQVYFCCCEGNFCNERFTHLPEAGGP |
| | 21) with 4 additional aa at N- | EVTYEPPPTAPT |
| | terminus | |
| 1112 | N23Q mutant of Hybrid hu- | GRGEAETRECIYYNANWEKDRTQQSGLERCEGEQDKRLHCYASWRNSSGTI |
| | ActRIIB-ECD (SEQ ID NO: | ELVKKGCWLDDFNCYDRQECVATEENPQVYFCCCEGNFCNERFTHLPEAGG |
| | 21) with 5 additional aa at N- | PEVTYEPPPTAPT |
| | terminus | |
| 1113 | N24Q mutant of Hybrid hu- | SGRGEAETRECIYYNANWEKDRTQQSGLERCEGEQDKRLHCYASWRNSSGT |
| | ActRIIB-ECD (SEQ ID NO: | IELVKKGCWLDDFNCYDRQECVATEENPQVYFCCCEGNFCNERFTHLPEAG |
| | 21) with 6 additional aa at N- | GPEVTYEPPPTAPT |
| | terminus | |
| 1114 | N19Q mutant of Hybrid hu- | AETQECIYYNANWELERTQQSGLERCEGEQDKRLHCYASWRNSSGTIELVK |
| | ActRIIB-ECD (SEQ ID NO: | KGCWLDDFNCYDRQECVATEENPQVYFCCCEGNFCNERFTHLPEAGGPEVT |
| | 22) with 1 additional aa at N- | YEPPPTAPT |
| | terminus | |
| 1115 | N20Q mutant of Hybrid hu- | EAETQECIYYNANWELERTQQSGLERCEGEQDKRLHCYASWRNSSGTIELV |
| | ActRIIB-ECD (SEQ ID NO: | KKGCWLDDFNCYDRQECVATEENPQVYFCCCEGNFCNERFTHLPEAGGPEV |
| | 22) with 2 additional aa at N- | TYEPPPTAPT |
| | terminus | |
| 1116 | N21Q mutant of Hybrid hu- | GEAETQECIYYNANWELERTQQSGLERCEGEQDKRLHCYASWRNSSGTIEL |
| | ActRIIB-ECD (SEQ ID NO: | VKKGCWLDDFNCYDRQECVATEENPQVYFCCCEGNFCNERFTHLPEAGGPE |
| | 22) with 3 additional aa at N- | VTYEPPPTAPT |
| | terminus | |
| 1117 | N22Q mutant of Hybrid hu- | RGEAETQECIYYNANWELERTQQSGLERCEGEQDKRLHCYASWRNSSGTIE |
| | ActRIIB-ECD (SEQ ID NO: | LVKKGCWLDDFNCYDRQECVATEENPQVYFCCCEGNFCNERFTHLPEAGGP |
| | 22) with 4 additional aa at N- | EVTYEPPPTAPT |
| | terminus | |
| 1118 | N23Q mutant of Hybrid hu- | GRGEAETQECIYYNANWELERTQQSGLERCEGEQDKRLHCYASWRNSSGTI |
| | ActRIIB-ECD (SEQ ID NO: | ELVKKGCWLDDFNCYDRQECVATEENPQVYFCCCEGNFCNERFTHLPEAGG |
| | 22) with 5 additional aa at N- | PEVTYEPPPTAPT |
| | terminus | |
| 1119 | N24Q mutant of Hybrid hu- | SGRGEAETQECIYYNANWELERTQQSGLERCEGEQDKRLHCYASWRNSSGT |
| | ActRIIB-ECD (SEQ ID NO: | IELVKKGCWLDDFNCYDRQECVATEENPQVYFCCCEGNFCNERFTHLPEAG |
| | 22) with 6 additional aa at N- | GPEVTYEPPPTAPT |
| | terminus | |
| 1120 | N19Q mutant of Hybrid hu- | AETRECIYYNANWELERTQQSGLERCEGEQDKRLHCFATWRNSSGTIELVK |
| | ActRIIB-ECD (SEQ ID NO: | QGCWLDDFNCYDRQECVATEENPQVYFCCCEGNFCNERFTHLPEAGGPEVT |
| | 23) with 1 additional aa at N- | YEPPPTAPT |
| | terminus | |
| 1121 | N20Q mutant of Hybrid hu- | EAETRECIYYNANWELERTQQSGLERCEGEQDKRLHCFATWRNSSGTIELVK |
| | ActRIIB-ECD (SEQ ID NO: | QGCWLDDFNCYDRQECVATEENPQVYFCCCEGNFCNERFTHLPEAGGPEVT |
| | 23) with 2 additional aa at N- | YEPPPTAPT |
| | terminus | |
| 1122 | N21Q mutant of Hybrid hu- | GEAETRECIYYNANWELERTQQSGLERCEGEQDKRLHCFATWRNSSGTIELV |
| | ActRIIB-ECD (SEQ ID NO: | KQGCWLDDFNCYDRQECVATEENPQVYFCCCEGNFCNERFTHLPEAGGPEV |
| | 23) with 3 additional aa at N- | TYEPPPTAPT |
| | terminus | |
| 1123 | N22Q mutant of Hybrid hu- | RGEAETRECIYYNANWELERTQQSGLERCEGEQDKRLHCFATWRNSSGTIEL |
| | ActRIIB-ECD (SEQ ID NO: | VKQGCWLDDFNCYDRQECVATEENPQVYFCCCEGNFCNERFTHLPEAGGPE |
| | 23) with 4 additional aa at N- | VTYEPPPTAPT |
| | terminus | |
| 1124 | N23Q mutant of Hybrid hu- | GRGEAETRECIYYNANWELERTQQSGLERCEGEQDKRLHCFATWRNSSGTI |
| | ActRIIB-ECD (SEQ ID NO: | ELVKQGCWLDDFNCYDRQECVATEENPQVYFCCCEGNFCNERFTHLPEAGG |
| | 23) with 5 additional aa at N- | PEVTYEPPPTAPT |
| | terminus | |
| 1125 | N24Q mutant of Hybrid hu- | SGRGEAETRECIYYNANWELERTQQSGLERCEGEQDKRLHCFATWRNSSGTI |
| | ActRIIB-ECD (SEQ ID NO: | ELVKQGCWLDDFNCYDRQECVATEENPQVYFCCCEGNFCNERFTHLPEAGG |
| | 23) with 6 additional aa at N- | PEVTYEPPPTAPT |
| | terminus | |
| 1126 | N19Q mutant of Hybrid hu- | AETRECIYYNANWELERTQQSGLERCYGDKDKRRHCYASWRNSSGTIELVK |
| | ActRIIB-ECD (SEQ ID NO: | KGCWLDDINCYDRQECVATEENPQVYFCCCEGNFCNERFTHLPEAGGPEVT |
| | 24) with 1 additional aa at N- | YEPPPTAPT |
| | terminus | |
| 1127 | N20Q mutant of Hybrid hu- | EAETRECIYYNANWELERTQQSGLERCYGDKDKRRHCYASWRNSSGTIELV |
| | ActRIIB-ECD (SEQ ID NO: | KKGCWLDDINCYDRQECVATEENPQVYFCCCEGNFCNERFTHLPEAGGPEV |
| | 24) with 2 additional aa at N- | TYEPPPTAPT |
| | terminus | |
| 1128 | N21Q mutant of Hybrid hu- | GEAETRECIYYNANWELERTQQSGLERCYGDKDKRRHCYASWRNSSGTIEL |
| | ActRIIB-ECD (SEQ ID NO: | VKKGCWLDDINCYDRQECVATEENPQVYFCCCEGNFCNERFTHLPEAGGPE |
| | 24) with 3 additional aa at N- | VTYEPPPTAPT |
| | terminus | |
| 1129 | N22Q mutant of Hybrid hu- | RGEAETRECIYYNANWELERTQQSGLERCYGDKDKRRHCYASWRNSSGTIE |
| | ActRIIB-ECD (SEQ ID NO: | LVKKGCWLDDINCYDRQECVATEENPQVYFCCCEGNFCNERFTHLPEAGGP |
| | 24) with 4 additional aa at N- | EVTYEPPPTAPT |
| | terminus | |
| 1130 | N23Q mutant of Hybrid hu- | GRGEAETRECIYYNANWELERTQQSGLERCYGDKDKRRHCYASWRNSSGTI |
| | ActRIIB-ECD (SEQ ID NO: | ELVKKGCWLDDINCYDRQECVATEENPQVYFCCCEGNFCNERFTHLPEAGG |
| | 24) with 5 additional aa at N- | PEVTYEPPPTAPT |
| | terminus | |
| 1131 | N24Q mutant of Hybrid hu- | SGRGEAETRECIYYNANWELERTQQSGLERCYGDKDKRRHCYASWRNSSG |
| | ActRIIB-ECD (SEQ ID NO: | TIELVKKGCWLDDINCYDRQECVATEENPQVYFCCCEGNFCNERFTHLPEAG |
| | 24) with 6 additional aa at N- | GPEVTYEPPPTAPT |
| | terminus | |
| 1132 | N19Q mutant of Hybrid hu- | AETRECIYYNANWELERTQQSGLERCEGEQDKRLHCYASWRNSSGTIELVK |
| | ActRIIB-ECD (SEQ ID NO: | KGCWLDDFNCYDRQECVATKENPQVYFCCCEGNFCNERFTHLPEAGGPEVT |
| | 25) with 1 additional aa at N- | YEPPPTAPT |
| | terminus | |
| 1133 | N20Q mutant of Hybrid hu- | EAETRECIYYNANWELERTQQSGLERCEGEQDKRLHCYASWRNSSGTIELV |
| | ActRIIB-ECD (SEQ ID NO: | KKGCWLDDFNCYDRQECVATKENPQVYFCCCEGNFCNERFTHLPEAGGPE |
| | 25) with 2 additional aa at N- | VTYEPPPTAPT |
| | terminus | |
| 1134 | N21Q mutant of Hybrid hu- | GEAETRECIYYNANWELERTQQSGLERCEGEQDKRLHCYASWRNSSGTIEL |
| | ActRIIB-ECD (SEQ ID NO: | VKKGCWLDDFNCYDRQECVATKENPQVYFCCCEGNFCNERFTHLPEAGGP |
| | 25) with 3 additional aa at N- | EVTYEPPPTAPT |
| | terminus | |
| 1135 | N22Q mutant of Hybrid hu- | RGEAETRECIYYNANWELERTQQSGLERCEGEQDKRLHCYASWRNSSGTIE |
| | ActRIIB-ECD (SEQ ID NO: | LVKKGCWLDDFNCYDRQECVATKENPQVYFCCCEGNFCNERFTHLPEAGG |
| | 25) with 4 additional aa at N- | PEVTYEPPPTAPT |
| | terminus | |
| 1136 | N23Q mutant of Hybrid hu- | GRGEAETRECIYYNANWELERTQQSGLERCEGEQDKRLHCYASWRNSSGTI |
| | ActRIIB-ECD (SEQ ID NO: | ELVKKGCWLDDFNCYDRQECVATKENPQVYFCCCEGNFCNERFTHLPEAG |
| | 25) with 5 additional aa at N- | GPEVTYEPPPTAPT |
| | terminus | |
| 1137 | N24Q mutant of Hybrid hu- | SGRGEAETRECIYYNANWELERTQQSGLERCEGEQDKRLHCYASWRNSSGT |
| | ActRIIB-ECD (SEQ ID NO: | IELVKKGCWLDDFNCYDRQECVATKENPQVYFCCCEGNFCNERFTHLPEAG |
| | 25) with 6 additional aa at N- | GPEVTYEPPPTAPT |
| | terminus | |
| 1138 | N19Q mutant of Hybrid hu- | AETRECIYYNANWELERTQQSGLERCEGEQDKRLHCYASWRNSSGTIELVK |
| | ActRIIB-ECD (SEQ ID NO: | KGCWLDDINCYDRQECVATEENPQVYFCCCEGNFCNERFTHLPEAGGPEVT |
| | 26) with 1 additional aa at N- | YEPPPTAPT |
| | terminus | |
| 1139 | N20Q mutant of Hybrid hu- | EAETRECIYYNANWELERTQQSGLERCEGEQDKRLHCYASWRNSSGTIELV |
| | ActRIIB-ECD (SEQ ID NO: | KKGCWLDDINCYDRQECVATEENPQVYFCCCEGNFCNERFTHLPEAGGPEV |
| | 26) with 2 additional aa at N- | TYEPPPTAPT |
| | terminus | |
| 1140 | N21Q mutant of Hybrid hu- | GEAETRECIYYNANWELERTQQSGLERCEGEQDKRLHCYASWRNSSGTIEL |
| | ActRIIB-ECD (SEQ ID NO: | VKKGCWLDDINCYDRQECVATEENPQVYFCCCEGNFCNERFTHLPEAGGPE |
| | 26) with 3 additional aa at N- | VTYEPPPTAPT |
| | terminus | |
| 1141 | N22Q mutant of Hybrid hu- | RGEAETRECIYYNANWELERTQQSGLERCEGEQDKRLHCYASWRNSSGTIE |
| | ActRIIB-ECD (SEQ ID NO: | LVKKGCWLDDINCYDRQECVATEENPQVYFCCCEGNFCNERFTHLPEAGGP |
| | 26) with 4 additional aa at N- | EVTYEPPPTAPT |
| | terminus | |
| 1142 | N23Q mutant of Hybrid hu- | GRGEAETRECIYYNANWELERTQQSGLERCEGEQDKRLHCYASWRNSSGTI |
| | ActRIIB-ECD (SEQ ID NO: | ELVKKGCWLDDINCYDRQECVATEENPQVYFCCCEGNFCNERFTHLPEAGG |
| | 26) with 5 additional aa at N- | PEVTYEPPPTAPT |
| | terminus | |
| 1143 | N24Q mutant of Hybrid hu- | SGRGEAETRECIYYNANWELERTQQSGLERCEGEQDKRLHCYASWRNSSGT |
| | ActRIIB-ECD (SEQ ID NO: | IELVKKGCWLDDINCYDRQECVATEENPQVYFCCCEGNFCNERFTHLPEAG |
| | 26) with 6 additional aa at N- | GPEVTYEPPPTAPT |
| | terminus | |
| 1144 | N19Q mutant of Hybrid hu- | AETRECIYYNANWELERTQQSGLERCEGEQDKRLHCYASWRNSSGTIELVK |
| | ActRIIB-ECD (SEQ ID NO: | KGCWLDDINCYDRQECVATKENPQVYFCCCEGNFCNERFTHLPEAGGPEVT |
| | 27) with 1 additional aa at N- | YEPPPTAPT |
| | terminus | |
| 1145 | N20Q mutant of Hybrid hu- | EAETRECIYYNANWELERTQQSGLERCEGEQDKRLHCYASWRNSSGTIELV |
| | ActRIIB-ECD (SEQ ID NO: | KKGCWLDDINCYDRQECVATKENPQVYFCCCEGNFCNERFTHLPEAGGPEV |
| | 27) with 2 additional aa at N- | TYEPPPTAPT |
| | terminus | |
| 1146 | N21Q mutant of Hybrid hu- | GEAETRECIYYNANWELERTQQSGLERCEGEQDKRLHCYASWRNSSGTIEL |
| | ActRIIB-ECD (SEQ ID NO: | VKKGCWLDDINCYDRQECVATKENPQVYFCCCEGNFCNERFTHLPEAGGPE |
| | 27) with 3 additional aa at N- | VTYEPPPTAPT |
| | terminus | |
| 1147 | N22Q mutant of Hybrid hu- | RGEAETRECIYYNANWELERTQQSGLERCEGEQDKRLHCYASWRNSSGTIE |
| | ActRIIB-ECD (SEQ ID NO: | LVKKGCWLDDINCYDRQECVATKENPQVYFCCCEGNFCNERFTHLPEAGGP |
| | 27) with 4 additional aa at N- | EVTYEPPPTAPT |
| | terminus | |
| 1148 | N23Q mutant of Hybrid hu- | GRGEAETRECIYYNANWELERTQQSGLERCEGEQDKRLHCYASWRNSSGTI |
| | ActRIIB-ECD (SEQ ID NO: | ELVKKGCWLDDINCYDRQECVATKENPQVYFCCCEGNFCNERFTHLPEAGG |
| | 27) with 5 additional aa at N- | PEVTYEPPPTAPT |
| | terminus | |
| 1149 | N24Q mutant of Hybrid hu- | SGRGEAETRECIYYNANWELERTQQSGLERCEGEQDKRLHCYASWRNSSGT |
| | ActRIIB-ECD (SEQ ID NO: | IELVKKGCWLDDINCYDRQECVATKENPQVYFCCCEGNFCNERFTHLPEAG |
| | 27) with 6 additional aa at N- | GPEVTYEPPPTAPT |
| | terminus | |
| 1150 | N19Q mutant of Hybrid hu- | AETRECIYYNANWELERTQQSGLERCEGDKDKRLHCYASWRNSSGTIELVK |
| | ActRIIB-ECD (SEQ ID NO: | KGCWLDDINCYDRQECVATKENPQVYFCCCEGNFCNERFTHLPEAGGPEVT |
| | 28) with 1 additional aa at N- | YEPPPTAPT |
| | terminus | |
| 1151 | N20Q mutant of Hybrid hu- | EAETRECIYYNANWELERTQQSGLERCEGDKDKRLHCYASWRNSSGTIELV |
| | ActRIIB-ECD (SEQ ID NO: | KKGCWLDDINCYDRQECVATKENPQVYFCCCEGNFCNERFTHLPEAGGPEV |
| | 28) with 2 additional aa at N- | TYEPPPTAPT |
| | terminus | |
| 1152 | N21Q mutant of Hybrid hu- | GEAETRECIYYNANWELERTQQSGLERCEGDKDKRLHCYASWRNSSGTIEL |
| | ActRIIB-ECD (SEQ ID NO: | VKKGCWLDDINCYDRQECVATKENPQVYFCCCEGNFCNERFTHLPEAGGPE |
| | 28) with 3 additional aa at N- | VTYEPPPTAPT |
| | terminus | |
| 1153 | N22Q mutant of Hybrid hu- | RGEAETRECIYYNANWELERTQQSGLERCEGDKDKRLHCYASWRNSSGTIE |
| | ActRIIB-ECD (SEQ ID NO: | LVKKGCWLDDINCYDRQECVATKENPQVYFCCCEGNFCNERFTHLPEAGGP |
| | 28) with 4 additional aa at N- | EVTYEPPPTAPT |
| | terminus | |
| 1154 | N23Q mutant of Hybrid hu- | GRGEAETRECIYYNANWELERTQQSGLERCEGDKDKRLHCYASWRNSSGTI |
| | ActRIIB-ECD (SEQ ID NO: | ELVKKGCWLDDINCYDRQECVATKENPQVYFCCCEGNFCNERFTHLPEAGG |
| | 28) with 5 additional aa at N- | PEVTYEPPPTAPT |
| | terminus | |
| 1155 | N24Q mutant of Hybrid hu- | SGRGEAETRECIYYNANWELERTQQSGLERCEGDKDKRLHCYASWRNSSGT |
| | ActRIIB-ECD (SEQ ID NO: | IELVKKGCWLDDINCYDRQECVATKENPQVYFCCCEGNFCNERFTHLPEAG |
| | 28) with 6 additional aa at N- | GPEVTYEPPPTAPT |
| | terminus | |
| 1156 | N19Q mutant of Hybrid hu- | AETRECIYYNANWELERTQQSGLERCEGDQDKRLHCYASWRNSSGTIELVK |
| | ActRIIB-ECD (SEQ ID NO: | KGCWLDDINCYDRQECVATKENPQVYFCCCEGNFCNERFTHLPEAGGPEVT |
| | 29) with 1 additional aa at N- | YEPPPTAPT |
| | terminus | |
| 1157 | N20Q mutant of Hybrid hu- | EAETRECIYYNANWELERTQQSGLERCEGDQDKRLHCYASWRNSSGTIELV |
| | ActRIIB-ECD (SEQ ID NO: | KKGCWLDDINCYDRQECVATKENPQVYFCCCEGNFCNERFTHLPEAGGPEV |
| | 29) with 2 additional aa at N- | TYEPPPTAPT |
| | terminus | |
| 1158 | N21Q mutant of Hybrid hu- | GEAETRECIYYNANWELERTQQSGLERCEGDQDKRLHCYASWRNSSGTIEL |
| | ActRIIB-ECD (SEQ ID NO: | VKKGCWLDDINCYDRQECVATKENPQVYFCCCEGNFCNERFTHLPEAGGPE |
| | 29) with 3 additional aa at N- | VTYEPPPTAPT |
| | terminus | |
| 1159 | N22Q mutant of Hybrid hu- | RGEAETRECIYYNANWELERTQQSGLERCEGDQDKRLHCYASWRNSSGTIE |
| | ActRIIB-ECD (SEQ ID NO: | LVKKGCWLDDINCYDRQECVATKENPQVYFCCCEGNFCNERFTHLPEAGGP |
| | 29) with 4 additional aa at N- | EVTYEPPPTAPT |
| | terminus | |
| 1160 | N23Q mutant of Hybrid hu- | GRGEAETRECIYYNANWELERTQQSGLERCEGDQDKRLHCYASWRNSSGTI |
| | ActRIIB-ECD (SEQ ID NO: | ELVKKGCWLDDINCYDRQECVATKENPQVYFCCCEGNFCNERFTHLPEAGG |
| | 29) with 5 additional aa at N- | PEVTYEPPPTAPT |
| | terminus | |
| 1161 | N24Q mutant of Hybrid hu- | SGRGEAETRECIYYNANWELERTQQSGLERCEGDQDKRLHCYASWRNSSGT |
| | ActRIIB-ECD (SEQ ID NO: | IELVKKGCWLDDINCYDRQECVATKENPQVYFCCCEGNFCNERFTHLPEAG |
| | 29) with 6 additional aa at N- | GPEVTYEPPPTAPT |
| | terminus | |
| 1162 | N19Q mutant of Hybrid hu- | AETRECIYYNANWELERTQQSGLERCEGDQDKRLHCYASWRNSSGTIELVK |
| | ActRIIB-ECD (SEQ ID NO: | KGCWLDDFNCYDRQECVATKENPQVYFCCCEGNFCNERFTHLPEAGGPEVT |
| | 30) with 1 additional aa at N- | YEPPPTAPT |
| | terminus | |
| 1163 | N20Q mutant of Hybrid hu- | EAETRECIYYNANWELERTQQSGLERCEGDQDKRLHCYASWRNSSGTIELV |
| | ActRIIB-ECD (SEQ ID NO: | KKGCWLDDFNCYDRQECVATKENPQVYFCCCEGNFCNERFTHLPEAGGPE |
| | 30) with 2 additional aa at N- | VTYEPPPTAPT |
| | terminus | |
| 1164 | N21Q mutant of Hybrid hu- | GEAETRECIYYNANWELERTQQSGLERCEGDQDKRLHCYASWRNSSGTIEL |
| | ActRIIB-ECD (SEQ ID NO: | VKKGCWLDDFNCYDRQECVATKENPQVYFCCCEGNFCNERFTHLPEAGGP |
| | 30) with 3 additional aa at N- | EVTYEPPPTAPT |
| | terminus | |
| 1165 | N22Q mutant of Hybrid hu- | RGEAETRECIYYNANWELERTQQSGLERCEGDQDKRLHCYASWRNSSGTIE |
| | ActRIIB-ECD (SEQ ID NO: | LVKKGCWLDDFNCYDRQECVATKENPQVYFCCCEGNFCNERFTHLPEAGG |
| | 30) with 4 additional aa at N- | PEVTYEPPPTAPT |
| | terminus | |
| 1166 | N23Q mutant of Hybrid hu- | GRGEAETRECIYYNANWELERTQQSGLERCEGDQDKRLHCYASWRNSSGTI |
| | ActRIIB-ECD (SEQ ID NO: | ELVKKGCWLDDFNCYDRQECVATKENPQVYFCCCEGNFCNERFTHLPEAG |
| | 30) with 5 additional aa at N- | GPEVTYEPPPTAPT |
| | terminus | |
| 1167 | N24Q mutant of Hybrid hu- | SGRGEAETRECIYYNANWELERTQQSGLERCEGDQDKRLHCYASWRNSSGT |
| | ActRIIB-ECD (SEQ ID NO: | IELVKKGCWLDDFNCYDRQECVATKENPQVYFCCCEGNFCNERFTHLPEAG |
| | 30) with 6 additional aa at N- | GPEVTYEPPPTAPT |
| | terminus | |
| 1168 | N19Q mutant of Hybrid hu- | AETRECIYYNANWELERTQQSGLERCEGDQDKRLHCYASWRNSSGTIELVK |
| | ActRIIB-ECD (SEQ ID NO: | KGCWLDDFNCYDRQECVATEENPQVYFCCCEGNFCNERFTHLPEAGGPEVT |
| | 31) with 1 additional aa at N- | YEPPPTAPT |
| | terminus | |
| 1169 | N20Q mutant of Hybrid hu- | EAETRECIYYNANWELERTQQSGLERCEGDQDKRLHCYASWRNSSGTIELV |
| | ActRIIB-ECD (SEQ ID NO: | KKGCWLDDFNCYDRQECVATEENPQVYFCCCEGNFCNERFTHLPEAGGPEV |
| | 31) with 2 additional aa at N- | TYEPPPTAPT |
| | terminus | |
| 1170 | N21Q mutant of Hybrid hu- | GEAETRECIYYNANWELERTQQSGLERCEGDQDKRLHCYASWRNSSGTIEL |
| | ActRIIB-ECD (SEQ ID NO: | VKKGCWLDDFNCYDRQECVATEENPQVYFCCCEGNFCNERFTHLPEAGGPE |
| | 31) with 3 additional aa at N- | VTYEPPPTAPT |
| | terminus | |
| 1171 | N22Q mutant of Hybrid hu- | RGEAETRECIYYNANWELERTQQSGLERCEGDQDKRLHCYASWRNSSGTIE |
| | ActRIIB-ECD (SEQ ID NO: | LVKKGCWLDDFNCYDRQECVATEENPQVYFCCCEGNFCNERFTHLPEAGGP |
| | 31) with 4 additional aa at N- | EVTYEPPPTAPT |
| | terminus | |
| 1172 | N23Q mutant of Hybrid hu- | GRGEAETRECIYYNANWELERTQQSGLERCEGDQDKRLHCYASWRNSSGTI |
| | ActRIIB-ECD (SEQ ID NO: | ELVKKGCWLDDFNCYDRQECVATEENPQVYFCCCEGNFCNERFTHLPEAGG |
| | 31) with 5 additional aa at N- | PEVTYEPPPTAPT |
| | terminus | |
| 1173 | N24Q mutant of Hybrid hu- | SGRGEAETRECIYYNANWELERTQQSGLERCEGDQDKRLHCYASWRNSSGT |
| | ActRIIB-ECD (SEQ ID NO: | IELVKKGCWLDDFNCYDRQECVATEENPQVYFCCCEGNFCNERFTHLPEAG |
| | 31) with 6 additional aa at N- | GPEVTYEPPPTAPT |
| | terminus | |
| 1174 | N19Q mutant of Hybrid hu- | AETRECIYYNANWELERTQQSGLERCYGDKDKRRHCYASWRNSSGTIELVK |
| | ActRIIB-ECD (SEQ ID NO: | KGCWLDDINCYDRQECVEKKDSPEVYFCCCEGNFCNERFTHLPEAGGPEVT |
| | 32) with 1 additional aa at N- | YEPPPTAPT |
| | terminus | |
| 1175 | N20Q mutant of Hybrid hu- | EAETRECIYYNANWELERTQQSGLERCYGDKDKRRHCYASWRNSSGTIELV |
| | ActRIIB-ECD (SEQ ID NO: | KKGCWLDDINCYDRQECVEKKDSPEVYFCCCEGNFCNERFTHLPEAGGPEV |
| | 32) with 2 additional aa at N- | TYEPPPTAPT |
| | terminus | |
| 1176 | N21Q mutant of Hybrid hu- | GEAETRECIYYNANWELERTQQSGLERCYGDKDKRRHCYASWRNSSGTIEL |
| | ActRIIB-ECD (SEQ ID NO: | VKKGCWLDDINCYDRQECVEKKDSPEVYFCCCEGNFCNERFTHLPEAGGPE |
| | 32) with 3 additional aa at N- | VTYEPPPTAPT |
| | terminus | |
| 1177 | N22Q mutant of Hybrid hu- | RGEAETRECIYYNANWELERTQQSGLERCYGDKDKRRHCYASWRNSSGTIE |
| | ActRIIB-ECD (SEQ ID NO: | LVKKGCWLDDINCYDRQECVEKKDSPEVYFCCCEGNFCNERFTHLPEAGGP |
| | 32) with 4 additional aa at N- | EVTYEPPPTAPT |
| | terminus | |
| 1178 | N23Q mutant of Hybrid hu- | GRGEAETRECIYYNANWELERTQQSGLERCYGDKDKRRHCYASWRNSSGTI |
| | ActRIIB-ECD (SEQ ID NO: | ELVKKGCWLDDINCYDRQECVEKKDSPEVYFCCCEGNFCNERFTHLPEAGG |
| | 32) with 5 additional aa at N- | PEVTYEPPPTAPT |
| | terminus | |
| 1179 | N24Q mutant of Hybrid hu- | SGRGEAETRECIYYNANWELERTQQSGLERCYGDKDKRRHCYASWRNSSG |
| | ActRIIB-ECD (SEQ ID NO: | TIELVKKGCWLDDINCYDRQECVEKKDSPEVYFCCCEGNFCNERFTHLPEAG |
| | 32) with 6 additional aa at N- | GPEVTYEPPPTAPT |
| | terminus | |
| 1180 | N19Q mutant of Hybrid hu- | AETRECIFFNANWEKDRTQQTGVEPCEGEQDKRLHCYASWRNSSGTIELVK |
| | ActRIIB-ECD (SEQ ID NO: | KGCWLDDFNCYDRQECVATEENPQVYFCCCEGNFCNERFTHLPEAGGPEVT |
| | 33) with 1 additional aa at N- | YEPPPTAPT |
| | terminus | |
| 1181 | N20Q mutant of Hybrid hu- | EAETRECIFFNANWEKDRTQQTGVEPCEGEQDKRLHCYASWRNSSGTIELV |
| | ActRIIB-ECD (SEQ ID NO: | KKGCWLDDFNCYDRQECVATEENPQVYFCCCEGNFCNERFTHLPEAGGPEV |
| | 33) with 2 additional aa at N- | TYEPPPTAPT |
| | terminus | |
| 1182 | N21Q mutant of Hybrid hu- | GEAETRECIFFNANWEKDRTQQTGVEPCEGEQDKRLHCYASWRNSSGTIEL |
| | ActRIIB-ECD (SEQ ID NO: | VKKGCWLDDFNCYDRQECVATEENPQVYFCCCEGNFCNERFTHLPEAGGPE |
| | 33) with 3 additional aa at N- | VTYEPPPTAPT |
| | terminus | |
| 1183 | N22Q mutant of Hybrid hu- | RGEAETRECIFFNANWEKDRTQQTGVEPCEGEQDKRLHCYASWRNSSGTIEL |
| | ActRIIB-ECD (SEQ ID NO: | VKKGCWLDDFNCYDRQECVATEENPQVYFCCCEGNFCNERFTHLPEAGGPE |
| | 33) with 4 additional aa at N- | VTYEPPPTAPT |
| | terminus | |
| 1184 | N23Q mutant of Hybrid hu- | GRGEAETRECIFFNANWEKDRTQQTGVEPCEGEQDKRLHCYASWRNSSGTI |
| | ActRIIB-ECD (SEQ ID NO: | ELVKKGCWLDDFNCYDRQECVATEENPQVYFCCCEGNFCNERFTHLPEAGG |
| | 33) with 5 additional aa at N- | PEVTYEPPPTAPT |
| | terminus | |
| 1185 | N24Q mutant of Hybrid hu- | SGRGEAETRECIFFNANWEKDRTQQTGVEPCEGEQDKRLHCYASWRNSSGT |
| | ActRIIB-ECD (SEQ ID NO: | IELVKKGCWLDDFNCYDRQECVATEENPQVYFCCCEGNFCNERFTHLPEAG |
| | 33) with 6 additional aa at N- | GPEVTYEPPPTAPT |
| | terminus | |
| 1186 | N19Q mutant of Hybrid hu- | AETRECIYYNANWELERTQQSGLERCEGEQDKRLHCFATWKNISGSIELVKQ |
| | ActRIIB-ECD (SEQ ID NO: | GCWLDDFNCYDRQECVATEENPQVYFCCCEGNFCNERFTHLPEAGGPEVTY |
| | 34) with 1 additional aa at N- | EPPPTAPT |
| | terminus | |
| 1187 | N20Q mutant of Hybrid hu- | EAETRECIYYNANWELERTQQSGLERCEGEQDKRLHCFATWKNISGSIELVK |
| | ActRIIB-ECD (SEQ ID NO: | QGCWLDDFNCYDRQECVATEENPQVYFCCCEGNFCNERFTHLPEAGGPEVT |
| | 34) with 2 additional aa at N- | YEPPPTAPT |
| | terminus | |
| 1188 | N21Q mutant of Hybrid hu- | GEAETRECIYYNANWELERTQQSGLERCEGEQDKRLHCFATWKNISGSIELV |
| | ActRIIB-ECD (SEQ ID NO: | KQGCWLDDFNCYDRQECVATEENPQVYFCCCEGNFCNERFTHLPEAGGPEV |
| | 34) with 3 additional aa at N- | TYEPPPTAPT |
| | terminus | |
| 1189 | N22Q mutant of Hybrid hu- | RGEAETRECIYYNANWELERTQQSGLERCEGEQDKRLHCFATWKNISGSIEL |
| | ActRIIB-ECD (SEQ ID NO: | VKQGCWLDDFNCYDRQECVATEENPQVYFCCCEGNFCNERFTHLPEAGGPE |
| | 34) with 4 additional aa at N- | VTYEPPPTAPT |
| | terminus | |
| 1190 | N23Q mutant of Hybrid hu- | GRGEAETRECIYYNANWELERTQQSGLERCEGEQDKRLHCFATWKNISGSIE |
| | ActRIIB-ECD (SEQ ID NO: | LVKQGCWLDDFNCYDRQECVATEENPQVYFCCCEGNFCNERFTHLPEAGGP |
| | 34) with 5 additional aa at N- | EVTYEPPPTAPT |
| | terminus | |
| 1191 | N24Q mutant of Hybrid hu- | SGRGEAETRECIYYNANWELERTQQSGLERCEGEQDKRLHCFATWKNISGSI |
| | ActRIIB-ECD (SEQ ID NO: | ELVKQGCWLDDFNCYDRQECVATEENPQVYFCCCEGNFCNERFTHLPEAGG |
| | 34) with 6 additional aa at N- | PEVTYEPPPTAPT |
| | terminus | |
| 1192 | N19Q mutant of Hybrid hu- | AETRECIYYNANWELERTQQSGLERCEGEQDKRLHCYASWRNSSGTIELVK |
| | ActRIIB-ECD (SEQ ID NO: | KGCWLDDFNCYDRTDCVATEENPQVYFCCCEGNFCNERFTHLPEAGGPEVT |
| | 35) with 1 additional aa at N- | YEPPPTAPT |
| | terminus | |
| 1193 | N20Q mutant of Hybrid hu- | EAETRECIYYNANWELERTQQSGLERCEGEQDKRLHCYASWRNSSGTIELV |
| | ActRIIB-ECD (SEQ ID NO: | KKGCWLDDFNCYDRTDCVATEENPQVYFCCCEGNFCNERFTHLPEAGGPEV |
| | 35) with 2 additional aa at N- | TYEPPPTAPT |
| | terminus | |
| 1194 | N21Q mutant of Hybrid hu- | GEAETRECIYYNANWELERTQQSGLERCEGEQDKRLHCYASWRNSSGTIEL |
| | ActRIIB-ECD (SEQ ID NO: | VKKGCWLDDFNCYDRTDCVATEENPQVYFCCCEGNFCNERFTHLPEAGGPE |
| | 35) with 3 additional aa at N- | VTYEPPPTAPT |
| | terminus | |
| 1195 | N22Q mutant of Hybrid hu- | RGEAETRECIYYNANWELERTQQSGLERCEGEQDKRLHCYASWRNSSGTIE |
| | ActRIIB-ECD (SEQ ID NO: | LVKKGCWLDDFNCYDRTDCVATEENPQVYFCCCEGNFCNERFTHLPEAGGP |
| | 35) with 4 additional aa at N- | EVTYEPPPTAPT |
| | terminus | |
| 1196 | N23Q mutant of Hybrid hu- | GRGEAETRECIYYNANWELERTQQSGLERCEGEQDKRLHCYASWRNSSGTI |
| | ActRIIB-ECD (SEQ ID NO: | ELVKKGCWLDDFNCYDRTDCVATEENPQVYFCCCEGNFCNERFTHLPEAGG |
| | 35) with 5 additional aa at N- | PEVTYEPPPTAPT |
| | terminus | |
| 1197 | N24Q mutant of Hybrid hu- | SGRGEAETRECIYYNANWELERTQQSGLERCEGEQDKRLHCYASWRNSSGT |
| | ActRIIB-ECD (SEQ ID NO: | IELVKKGCWLDDFNCYDRTDCVATEENPQVYFCCCEGNFCNERFTHLPEAG |
| | 35) with 6 additional aa at N- | GPEVTYEPPPTAPT |
| | terminus | |
| 1198 | N19Q mutant of Hybrid hu- | AETRECIYYNANWELERTQQSGLERCEGEQDKRLHCYASWRNSSGTIELVK |
| | ActRIIB-ECD (SEQ ID NO: | KGCWLDDFNCYDRQECVATEENPQVYFCCCEGNMCNERFTHLPEAGGPEV |
| | 36) with 1 additional aa at N- | TYEPPPTAPT |
| | terminus | |
| 1199 | N20Q mutant of Hybrid hu- | EAETRECIYYNANWELERTQQSGLERCEGEQDKRLHCYASWRNSSGTIELV |
| | ActRIIB-ECD (SEQ ID NO: | KKGCWLDDFNCYDRQECVATEENPQVYFCCCEGNMCNERFTHLPEAGGPE |
| | 36) with 2 additional aa at N- | VTYEPPPTAPT |
| | terminus | |
| 1200 | N21Q mutant of Hybrid hu- | GEAETRECIYYNANWELERTQQSGLERCEGEQDKRLHCYASWRNSSGTIEL |
| | ActRIIB-ECD (SEQ ID NO: | VKKGCWLDDFNCYDRQECVATEENPQVYFCCCEGNMCNERFTHLPEAGGP |
| | 36) with 3 additional aa at N- | EVTYEPPPTAPT |
| | terminus | |
| 1201 | N22Q mutant of Hybrid hu- | RGEAETRECIYYNANWELERTQQSGLERCEGEQDKRLHCYASWRNSSGTIE |
| | ActRIIB-ECD (SEQ ID NO: | LVKKGCWLDDFNCYDRQECVATEENPQVYFCCCEGNMCNERFTHLPEAGG |
| | 36) with 4 additional aa at N- | PEVTYEPPPTAPT |
| | terminus | |
| 1202 | N23Q mutant of Hybrid hu- | GRGEAETRECIYYNANWELERTQQSGLERCEGEQDKRLHCYASWRNSSGTI |
| | ActRIIB-ECD (SEQ ID NO: | ELVKKGCWLDDFNCYDRQECVATEENPQVYFCCCEGNMCNERFTHLPEAG |
| | 36) with 5 additional aa at N- | GPEVTYEPPPTAPT |
| | terminus | |
| 1203 | N24Q mutant of Hybrid hu- | SGRGEAETRECIYYNANWELERTQQSGLERCEGEQDKRLHCYASWRNSSGT |
| | ActRIIB-ECD (SEQ ID NO: | IELVKKGCWLDDFNCYDRQECVATEENPQVYFCCCEGNMCNERFTHLPEAG |
| | 36) with 6 additional aa at N- | GPEVTYEPPPTAPT |
| | terminus | |
| 1204 | N19Q mutant of Hybrid hu- | AETRECIYYNANWELERTQQSGLERCEGDQDKRLHCYASWRNSSGTIELVK |
| | ActRIIB-ECD (SEQ ID NO: | KGCWLDDINCYDRQECVATEENPQVYFCCCEGNFCNERFTHLPEAGGPEVT |
| | 37) with 1 additional aa at N- | YEPPPTAPT |
| | terminus | |
| 1205 | N20Q mutant of Hybrid hu- | EAETRECIYYNANWELERTQQSGLERCEGDQDKRLHCYASWRNSSGTIELV |
| | ActRIIB-ECD (SEQ ID NO: | KKGCWLDDINCYDRQECVATEENPQVYFCCCEGNFCNERFTHLPEAGGPEV |
| | 37) with 2 additional aa at N- | TYEPPPTAPT |
| | terminus | |
| 1206 | N21Q mutant of Hybrid hu- | GEAETRECIYYNANWELERTQQSGLERCEGDQDKRLHCYASWRNSSGTIEL |
| | ActRIIB-ECD (SEQ ID NO: | VKKGCWLDDINCYDRQECVATEENPQVYFCCCEGNFCNERFTHLPEAGGPE |
| | 37) with 3 additional aa at N- | VTYEPPPTAPT |
| | terminus | |
| 1207 | N22Q mutant of Hybrid hu- | RGEAETRECIYYNANWELERTQQSGLERCEGDQDKRLHCYASWRNSSGTIE |
| | ActRIIB-ECD (SEQ ID NO: | LVKKGCWLDDINCYDRQECVATEENPQVYFCCCEGNFCNERFTHLPEAGGP |
| | 37) with 4 additional aa at N- | EVTYEPPPTAPT |
| | terminus | |
| 1208 | N23Q mutant of Hybrid hu- | GRGEAETRECIYYNANWELERTQQSGLERCEGDQDKRLHCYASWRNSSGTI |
| | ActRIIB-ECD (SEQ ID NO: | ELVKKGCWLDDINCYDRQECVATEENPQVYFCCCEGNFCNERFTHLPEAGG |
| | 37) with 5 additional aa at N- | PEVTYEPPPTAPT |
| | terminus | |
| 1209 | N24Q mutant of Hybrid hu- | SGRGEAETRECIYYNANWELERTQQSGLERCEGDQDKRLHCYASWRNSSGT |
| | ActRIIB-ECD (SEQ ID NO: | IELVKKGCWLDDINCYDRQECVATEENPQVYFCCCEGNFCNERFTHLPEAG |
| | 37) with 6 additional aa at N- | GPEVTYEPPPTAPT |
| | terminus | |
| 1210 | N19Q mutant of Hybrid hu- | AETQECLFFNANWEKDRTQQSGVEPCYGDKDKRRHCYASWRNSSGTIELVK |
| | ActRIIB-ECD (SEQ ID NO: | KGCWLDDFNCYDRQECVATEENPQVYFCCCEGNFCNERFTHLPEAGGPEVT |
| | 51) with 1 additional aa at N- | YEPPPTAPT |
| | terminus | |
| 1211 | N20Q mutant of Hybrid hu- | EAETQECLFFNANWEKDRTQQSGVEPCYGDKDKRRHCYASWRNSSGTIELV |
| | ActRIIB-ECD (SEQ ID NO: | KKGCWLDDFNCYDRQECVATEENPQVYFCCCEGNFCNERFTHLPEAGGPEV |
| | 51) with 2 additional aa at N- | TYEPPPTAPT |
| | terminus | |
| 1212 | N21Q mutant of Hybrid hu- | GEAETQECLFFNANWEKDRTQQSGVEPCYGDKDKRRHCYASWRNSSGTIEL |
| | ActRIIB-ECD (SEQ ID NO: | VKKGCWLDDFNCYDRQECVATEENPQVYFCCCEGNFCNERFTHLPEAGGPE |
| | 51) with 3 additional aa at N- | VTYEPPPTAPT |
| | terminus | |
| 1213 | N22Q mutant of Hybrid hu- | RGEAETQECLFFNANWEKDRTQQSGVEPCYGDKDKRRHCYASWRNSSGTIE |
| | ActRIIB-ECD (SEQ ID NO: | LVKKGCWLDDFNCYDRQECVATEENPQVYFCCCEGNFCNERFTHLPEAGGP |
| | 51) with 4 additional aa at N- | EVTYEPPPTAPT |
| | terminus | |
| 1214 | N23Q mutant of Hybrid hu- | GRGEAETQECLFFNANWEKDRTQQSGVEPCYGDKDKRRHCYASWRNSSGT |
| | ActRIIB-ECD (SEQ ID NO: | IELVKKGCWLDDFNCYDRQECVATEENPQVYFCCCEGNFCNERFTHLPEAG |
| | 51) with 5 additional aa at N- | GPEVTYEPPPTAPT |
| | terminus | |
| 1215 | N24Q mutant of Hybrid hu- | SGRGEAETQECLFFNANWEKDRTQQSGVEPCYGDKDKRRHCYASWRNSSG |
| | ActRIIB-ECD (SEQ ID NO: | TIELVKKGCWLDDFNCYDRQECVATEENPQVYFCCCEGNFCNERFTHLPEA |
| | 51) with 6 additional aa at N- | GGPEVTYEPPPTAPT |
| | terminus | |
| 1216 | N19Q mutant of Hybrid hu- | AETQECLFFNANWEKDRTQQSGVEPCEGEQDKRLHCYASWRNSSGTIELVK |
| | ActRIIB-ECD (SEQ ID NO: | KGCWLDDFNCYDRQECVATEENPQVYFCCCEGNFCNERFTHLPEAGGPEVT |
| | 52) with 1 additional aa at N- | YEPPPTAPT |
| | terminus | |
| 1217 | N20Q mutant of Hybrid hu- | EAETQECLFFNANWEKDRTQQSGVEPCEGEQDKRLHCYASWRNSSGTIELV |
| | ActRIIB-ECD (SEQ ID NO: | KKGCWLDDFNCYDRQECVATEENPQVYFCCCEGNFCNERFTHLPEAGGPEV |
| | 52) with 2 additional aa at N- | TYEPPPTAPT |
| | terminus | |
| 1218 | N21Q mutant of Hybrid hu- | GEAETQECLFFNANWEKDRTQQSGVEPCEGEQDKRLHCYASWRNSSGTIEL |
| | ActRIIB-ECD (SEQ ID NO: | VKKGCWLDDFNCYDRQECVATEENPQVYFCCCEGNFCNERFTHLPEAGGPE |
| | 52) with 3 additional aa at N- | VTYEPPPTAPT |
| | terminus | |
| 1219 | N22Q mutant of Hybrid hu- | RGEAETQECLFFNANWEKDRTQQSGVEPCEGEQDKRLHCYASWRNSSGTIE |
| | ActRIIB-ECD (SEQ ID NO: | LVKKGCWLDDFNCYDRQECVATEENPQVYFCCCEGNFCNERFTHLPEAGGP |
| | 52) with 4 additional aa at N- | EVTYEPPPTAPT |
| | terminus | |
| 1220 | N23Q mutant of Hybrid hu- | GRGEAETQECLFFNANWEKDRTQQSGVEPCEGEQDKRLHCYASWRNSSGTI |
| | ActRIIB-ECD (SEQ ID NO: | ELVKKGCWLDDFNCYDRQECVATEENPQVYFCCCEGNFCNERFTHLPEAGG |
| | 52) with 5 additional aa at N- | PEVTYEPPPTAPT |
| | terminus | |
| 1221 | N24Q mutant of Hybrid hu- | SGRGEAETQECLFFNANWEKDRTQQSGVEPCEGEQDKRLHCYASWRNSSGT |
| | ActRIIB-ECD (SEQ ID NO: | IELVKKGCWLDDFNCYDRQECVATEENPQVYFCCCEGNFCNERFTHLPEAG |
| | 52) with 6 additional aa at N- | GPEVTYEPPPTAPT |
| | terminus | |
| 1222 | N19Q mutant of Hybrid hu- | AETRECLFFNANWEKDRTQQSGVEPCEGEQDKRLHCYASWRNSSGTIELVK |
| | ActRIIB-ECD (SEQ ID NO: | KGCWLDDFNCYDRQECVATEENPQVYFCCCEGNFCNERFTHLPEAGGPEVT |
| | 53) with 1 additional aa at N- | YEPPPTAPT |
| | terminus | |
| 1223 | N20Q mutant of Hybrid hu- | EAETRECLFFNANWEKDRTQQSGVEPCEGEQDKRLHCYASWRNSSGTIELV |
| | ActRIIB-ECD (SEQ ID NO: | KKGCWLDDFNCYDRQECVATEENPQVYFCCCEGNFCNERFTHLPEAGGPEV |
| | 53) with 2 additional aa at N- | TYEPPPTAPT |
| | terminus | |
| 1224 | N21Q mutant of Hybrid hu- | GEAETRECLFFNANWEKDRTQQSGVEPCEGEQDKRLHCYASWRNSSGTIEL |
| | ActRIIB-ECD (SEQ ID NO: | VKKGCWLDDFNCYDRQECVATEENPQVYFCCCEGNFCNERFTHLPEAGGPE |
| | 53) with 3 additional aa at N- | VTYEPPPTAPT |
| | terminus | |
| 1225 | N22Q mutant of Hybrid hu- | RGEAETRECLFFNANWEKDRTQQSGVEPCEGEQDKRLHCYASWRNSSGTIE |
| | ActRIIB-ECD (SEQ ID NO: | LVKKGCWLDDFNCYDRQECVATEENPQVYFCCCEGNFCNERFTHLPEAGGP |
| | 53) with 4 additional aa at N- | EVTYEPPPTAPT |
| | terminus | |
| 1226 | N23Q mutant of Hybrid hu- | GRGEAETRECLFFNANWEKDRTQQSGVEPCEGEQDKRLHCYASWRNSSGTI |
| | ActRIIB-ECD (SEQ ID NO: | ELVKKGCWLDDFNCYDRQECVATEENPQVYFCCCEGNFCNERFTHLPEAGG |
| | 53) with 5 additional aa at N- | PEVTYEPPPTAPT |
| | terminus | |
| 1227 | N24Q mutant of Hybrid hu- | SGRGEAETRECLFFNANWEKDRTQQSGVEPCEGEQDKRLHCYASWRNSSGT |
| | ActRIIB-ECD (SEQ ID NO: | IELVKKGCWLDDFNCYDRQECVATEENPQVYFCCCEGNFCNERFTHLPEAG |
| | 53) with 6 additional aa at N- | GPEVTYEPPPTAPT |
| | terminus | |
| 1228 | N19Q mutant of Hybrid hu- | AETQECLFFNANWEKDRTQQSGVEPCYGEQDKRLHCYASWRNSSGTIELVK |
| | ActRIIB-ECD (SEQ ID NO: | KGCWLDDFNCYDRQECVATEENPQVYFCCCEGNFCNERFTHLPEAGGPEVT |
| | 54) with 1 additional aa at N- | YEPPPTAPT |
| | terminus | |
| 1229 | N20Q mutant of Hybrid hu- | EAETQECLFFNANWEKDRTQQSGVEPCYGEQDKRLHCYASWRNSSGTIELV |
| | ActRIIB-ECD (SEQ ID NO: | KKGCWLDDFNCYDRQECVATEENPQVYFCCCEGNFCNERFTHLPEAGGPEV |
| | 54) with 2 additional aa at N- | TYEPPPTAPT |
| | terminus | |
| 1230 | N21Q mutant of Hybrid hu- | GEAETQECLFFNANWEKDRTQQSGVEPCYGEQDKRLHCYASWRNSSGTIEL |
| | ActRIIB-ECD (SEQ ID NO: | VKKGCWLDDFNCYDRQECVATEENPQVYFCCCEGNFCNERFTHLPEAGGPE |
| | 54) with 3 additional aa at N- | VTYEPPPTAPT |
| | terminus | |
| 1231 | N22Q mutant of Hybrid hu- | RGEAETQECLFFNANWEKDRTQQSGVEPCYGEQDKRLHCYASWRNSSGTIE |
| | ActRIIB-ECD (SEQ ID NO: | LVKKGCWLDDFNCYDRQECVATEENPQVYFCCCEGNFCNERFTHLPEAGGP |
| | 54) with 4 additional aa at N- | EVTYEPPPTAPT |
| | terminus | |
| 1232 | N23Q mutant of Hybrid hu- | GRGEAETQECLFFNANWEKDRTQQSGVEPCYGEQDKRLHCYASWRNSSGTI |
| | ActRIIB-ECD (SEQ ID NO: | ELVKKGCWLDDFNCYDRQECVATEENPQVYFCCCEGNFCNERFTHLPEAGG |
| | 54) with 5 additional aa at N- | PEVTYEPPPTAPT |
| | terminus | |
| 1233 | N24Q mutant of Hybrid hu- | SGRGEAETQECLFFNANWEKDRTQQSGVEPCYGEQDKRLHCYASWRNSSG |
| | ActRIIB-ECD (SEQ ID NO: | TIELVKKGCWLDDFNCYDRQECVATEENPQVYFCCCEGNFCNERFTHLPEA |
| | 54) with 6 additional aa at N- | GGPEVTYEPPPTAPT |
| | terminus | |
| 1234 | N19Q mutant of Hybrid hu- | AETRECLFFNANWEKDRTQQSGVEPCYGDKDKRRHCYASWRNSSGTIELVK |
| | ActRIIB-ECD (SEQ ID NO: | KGCWLDDFNCYDRQECVATEENPQVYFCCCEGNFCNERFTHLPEAGGPEVT |
| | 55) with 1 additional aa at N- | YEPPPTAPT |
| | terminus | |
| 1235 | N20Q mutant of Hybrid hu- | EAETRECLFFNANWEKDRTQQSGVEPCYGDKDKRRHCYASWRNSSGTIELV |
| | ActRIIB-ECD (SEQ ID NO: | KKGCWLDDFNCYDRQECVATEENPQVYFCCCEGNFCNERFTHLPEAGGPEV |
| | 55) with 2 additional aa at N- | TYEPPPTAPT |
| | terminus | |
| 1236 | N21Q mutant of Hybrid hu- | GEAETRECLFFNANWEKDRTQQSGVEPCYGDKDKRRHCYASWRNSSGTIEL |
| | ActRIIB-ECD (SEQ ID NO: | VKKGCWLDDFNCYDRQECVATEENPQVYFCCCEGNFCNERFTHLPEAGGPE |
| | 55) with 3 additional aa at N- | VTYEPPPTAPT |
| | terminus | |
| 1237 | N22Q mutant of Hybrid hu- | RGEAETRECLFFNANWEKDRTQQSGVEPCYGDKDKRRHCYASWRNSSGTIE |
| | ActRIIB-ECD (SEQ ID NO: | LVKKGCWLDDFNCYDRQECVATEENPQVYFCCCEGNFCNERFTHLPEAGGP |
| | 55) with 4 additional aa at N- | EVTYEPPPTAPT |
| | terminus | |
| 1238 | N23Q mutant of Hybrid hu- | GRGEAETRECLFFNANWEKDRTQQSGVEPCYGDKDKRRHCYASWRNSSGTI |
| | ActRIIB-ECD (SEQ ID NO: | ELVKKGCWLDDFNCYDRQECVATEENPQVYFCCCEGNFCNERFTHLPEAGG |
| | 55) with 5 additional aa at N- | PEVTYEPPPTAPT |
| | terminus | |
| 1239 | N24Q mutant of Hybrid hu- | SGRGEAETRECLFFNANWEKDRTQQSGVEPCYGDKDKRRHCYASWRNSSG |
| | ActRIIB-ECD (SEQ ID NO: | TIELVKKGCWLDDFNCYDRQECVATEENPQVYFCCCEGNFCNERFTHLPEA |
| | 55) with 6 additional aa at N- | GGPEVTYEPPPTAPT |
| | terminus | |
| 1240 | N19Q mutant of Hybrid hu- | AETRECLFFNANWEKDRTQQTGVEPCYGDKDKRRHCFATWKNISGSIEIVK |
| | ActRIIB-ECD (SEQ ID NO: | QGCWLDDFNCYDRQECVATEENPQVYFCCCEGNFCNERFTHLPEAGGPEVT |
| | 56) with 1 additional aa at N- | YEPPPTAPT |
| | terminus | |
| 1241 | N20Q mutant of Hybrid hu- | EAETRECLFFNANWEKDRTQQTGVEPCYGDKDKRRHCFATWKNISGSIEIVK |
| | ActRIIB-ECD (SEQ ID NO: | QGCWLDDFNCYDRQECVATEENPQVYFCCCEGNFCNERFTHLPEAGGPEVT |
| | 56) with 2 additional aa at N- | YEPPPTAPT |
| | terminus | |
| 1242 | N21Q mutant of Hybrid hu- | GEAETRECLFFNANWEKDRTQQTGVEPCYGDKDKRRHCFATWKNISGSIEIV |
| | ActRIIB-ECD (SEQ ID NO: | KQGCWLDDFNCYDRQECVATEENPQVYFCCCEGNFCNERFTHLPEAGGPEV |
| | 56) with 3 additional aa at N- | TYEPPPTAPT |
| | terminus | |
| 1243 | N22Q mutant of Hybrid hu- | RGEAETRECLFFNANWEKDRTQQTGVEPCYGDKDKRRHCFATWKNISGSIEI |
| | ActRIIB-ECD (SEQ ID NO: | VKQGCWLDDFNCYDRQECVATEENPQVYFCCCEGNFCNERFTHLPEAGGPE |
| | 56) with 4 additional aa at N- | VTYEPPPTAPT |
| | terminus | |
| 1244 | N23Q mutant of Hybrid hu- | GRGEAETRECLFFNANWEKDRTQQTGVEPCYGDKDKRRHCFATWKNISGSI |
| | ActRIIB-ECD (SEQ ID NO: | EIVKQGCWLDDFNCYDRQECVATEENPQVYFCCCEGNFCNERFTHLPEAGG |
| | 56) with 5 additional aa at N- | PEVTYEPPPTAPT |
| | terminus | |
| 1245 | N24Q mutant of Hybrid hu- | SGRGEAETRECLFFNANWEKDRTQQTGVEPCYGDKDKRRHCFATWKNISGS |
| | ActRIIB-ECD (SEQ ID NO: | IEIVKQGCWLDDFNCYDRQECVATEENPQVYFCCCEGNFCNERFTHLPEAG |
| | 56) with 6 additional aa at N- | GPEVTYEPPPTAPT |
| | terminus | |
| 1246 | N19Q mutant of Hybrid hu- | AETRECLFFNANWEKDRTQQTGVEPCYGDKDKRRHCFATWKNISGSIEIVK |
| | ActRIIB-ECD (SEQ ID NO: | QGCWLDDINCYDRQECVATEENPQVYFCCCEGNFCNERFTHLPEAGGPEVT |
| | 57) with 1 additional aa at N- | YEPPPTAPT |
| | terminus | |
| 1247 | N20Q mutant of Hybrid hu- | EAETRECLFFNANWEKDRTQQTGVEPCYGDKDKRRHCFATWKNISGSIEIVK |
| | ActRIIB-ECD (SEQ ID NO: | QGCWLDDINCYDRQECVATEENPQVYFCCCEGNFCNERFTHLPEAGGPEVT |
| | 57) with 2 additional aa at N- | YEPPPTAPT |
| | terminus | |
| 1248 | N21Q mutant of Hybrid hu- | GEAETRECLFFNANWEKDRTQQTGVEPCYGDKDKRRHCFATWKNISGSIEIV |
| | ActRIIB-ECD (SEQ ID NO: | KQGCWLDDINCYDRQECVATEENPQVYFCCCEGNFCNERFTHLPEAGGPEV |
| | 57) with 3 additional aa at N- | TYEPPPTAPT |
| | terminus | |
| 1249 | N22Q mutant of Hybrid hu- | RGEAETRECLFFNANWEKDRTQQTGVEPCYGDKDKRRHCFATWKNISGSIEI |
| | ActRIIB-ECD (SEQ ID NO: | VKQGCWLDDINCYDRQECVATEENPQVYFCCCEGNFCNERFTHLPEAGGPE |
| | 57) with 4 additional aa at N- | VTYEPPPTAPT |
| | terminus | |
| 1250 | N23Q mutant of Hybrid hu- | GRGEAETRECLFFNANWEKDRTQQTGVEPCYGDKDKRRHCFATWKNISGSI |
| | ActRIIB-ECD (SEQ ID NO: | EIVKQGCWLDDINCYDRQECVATEENPQVYFCCCEGNFCNERFTHLPEAGG |
| | 57) with 5 additional aa at N- | PEVTYEPPPTAPT |
| | terminus | |
| 1251 | N24Q mutant of Hybrid hu- | SGRGEAETRECLFFNANWEKDRTQQTGVEPCYGDKDKRRHCFATWKNISGS |
| | ActRIIB-ECD (SEQ ID NO: | IEIVKQGCWLDDINCYDRQECVATEENPQVYFCCCEGNFCNERFTHLPEAGG |
| | 57) with 6 additional aa at N- | PEVTYEPPPTAPT |
| | terminus | |
| 1252 | N19Q mutant of Hybrid hu- | AETRECLFFNANWEKDRTQQTGVEPCYGDKDKRRHCFATWKNISGSIEIVK |
| | ActRIIB-ECD (SEQ ID NO: | QGCWLDDINCYDRTDCVEKKDSPEVYFCCCEGNFCNERFTHLPEAGGPEVT |
| | 58) with 1 additional aa at N- | YEPPPTAPT |
| | terminus | |
| 1253 | N20Q mutant of Hybrid hu- | EAETRECLFFNANWEKDRTQQTGVEPCYGDKDKRRHCFATWKNISGSIEIVK |
| | ActRIIB-ECD (SEQ ID NO: | QGCWLDDINCYDRTDCVEKKDSPEVYFCCCEGNFCNERFTHLPEAGGPEVT |
| | 58) with 2 additional aa at N- | YEPPPTAPT |
| | terminus | |
| 1254 | N21Q mutant of Hybrid hu- | GEAETRECLFFNANWEKDRTQQTGVEPCYGDKDKRRHCFATWKNISGSIEIV |
| | ActRIIB-ECD (SEQ ID NO: | KQGCWLDDINCYDRTDCVEKKDSPEVYFCCCEGNFCNERFTHLPEAGGPEV |
| | 58) with 3 additional aa at N- | TYEPPPTAPT |
| | terminus | |
| 1255 | N22Q mutant of Hybrid hu- | RGEAETRECLFFNANWEKDRTQQTGVEPCYGDKDKRRHCFATWKNISGSIEI |
| | ActRIIB-ECD (SEQ ID NO: | VKQGCWLDDINCYDRTDCVEKKDSPEVYFCCCEGNFCNERFTHLPEAGGPE |
| | 58) with 4 additional aa at N- | VTYEPPPTAPT |
| | terminus | |
| 1256 | N23Q mutant of Hybrid hu- | GRGEAETRECLFFNANWEKDRTQQTGVEPCYGDKDKRRHCFATWKNISGSI |
| | ActRIIB-ECD (SEQ ID NO: | EIVKQGCWLDDINCYDRTDCVEKKDSPEVYFCCCEGNFCNERFTHLPEAGGP |
| | 58) with 5 additional aa at N- | EVTYEPPPTAPT |
| | terminus | |
| 1257 | N24Q mutant of Hybrid hu- | SGRGEAETRECLFFNANWEKDRTQQTGVEPCYGDKDKRRHCFATWKNISGS |
| | ActRIIB-ECD (SEQ ID NO: | IEIVKQGCWLDDINCYDRTDCVEKKDSPEVYFCCCEGNFCNERFTHLPEAGG |
| | 58) with 6 additional aa at N- | PEVTYEPPPTAPT |
| | terminus | |
| 1258 | N19Q mutant of Hybrid hu- | AETQECIYYNANWELERTQQSGLERCYGDKDKRRHCFATWKNISGSIEIVKQ |
| | ActRIIB-ECD (SEQ ID NO: | GCWLDDINCYDRQECVATEENPQVYFCCCEGNFCNERFTHLPEAGGPEVTY |
| | 59) with 1 additional aa at N- | EPPPTAPT |
| | terminus | |
| 1259 | N20Q mutant of Hybrid hu- | EAETQECIYYNANWELERTQQSGLERCYGDKDKRRHCFATWKNISGSIEIVK |
| | ActRIIB-ECD (SEQ ID NO: | QGCWLDDINCYDRQECVATEENPQVYFCCCEGNFCNERFTHLPEAGGPEVT |
| | 59) with 2 additional aa at N- | YEPPPTAPT |
| | terminus | |
| 1260 | N21Q mutant of Hybrid hu- | GEAETQECIYYNANWELERTQQSGLERCYGDKDKRRHCFATWKNISGSIEIV |
| | ActRIIB-ECD (SEQ ID NO: | KQGCWLDDINCYDRQECVATEENPQVYFCCCEGNFCNERFTHLPEAGGPEV |
| | 59) with 3 additional aa at N- | TYEPPPTAPT |
| | terminus | |
| 1261 | N22Q mutant of Hybrid hu- | RGEAETQECIYYNANWELERTQQSGLERCYGDKDKRRHCFATWKNISGSIEI |
| | ActRIIB-ECD (SEQ ID NO: | VKQGCWLDDINCYDRQECVATEENPQVYFCCCEGNFCNERFTHLPEAGGPE |
| | 59) with 4 additional aa at N- | VTYEPPPTAPT |
| | terminus | |
| 1262 | N23Q mutant of Hybrid hu- | GRGEAETQECIYYNANWELERTQQSGLERCYGDKDKRRHCFATWKNISGSI |
| | ActRIIB-ECD (SEQ ID NO: | EIVKQGCWLDDINCYDRQECVATEENPQVYFCCCEGNFCNERFTHLPEAGG |
| | 59) with 5 additional aa at N- | PEVTYEPPPTAPT |
| | terminus | |
| 1263 | N24Q mutant of Hybrid hu- | SGRGEAETQECIYYNANWELERTQQSGLERCYGDKDKRRHCFATWKNISGS |
| | ActRIIB-ECD (SEQ ID NO: | IEIVKQGCWLDDINCYDRQECVATEENPQVYFCCCEGNFCNERFTHLPEAGG |
| | 59) with 6 additional aa at N- | PEVTYEPPPTAPT |
| | terminus | |
| 1264 | N19Q mutant of Hybrid hu- | AETRECIYYNANWELERTQQSGLERCYGDKDKRRHCFATWKNISGSIEIVKQ |
| | ActRIIB-ECD (SEQ ID NO: | GCWLDDINCYDRTDCVEKKDSPEVYFCCCEGNFCNERFTHLPEAGGPEVTY |
| | 60) with 1 additional aa at N- | EPPPTAPT |
| | terminus | |
| 1265 | N20Q mutant of Hybrid hu- | EAETRECIYYNANWELERTQQSGLERCYGDKDKRRHCFATWKNISGSIEIVK |
| | ActRIIB-ECD (SEQ ID NO: | QGCWLDDINCYDRTDCVEKKDSPEVYFCCCEGNFCNERFTHLPEAGGPEVT |
| | 60) with 2 additional aa at N- | YEPPPTAPT |
| | terminus | |
| 1266 | N21Q mutant of Hybrid hu- | GEAETRECIYYNANWELERTQQSGLERCYGDKDKRRHCFATWKNISGSIEIV |
| | ActRIIB-ECD (SEQ ID NO: | KQGCWLDDINCYDRTDCVEKKDSPEVYFCCCEGNFCNERFTHLPEAGGPEV |
| | 60) with 3 additional aa at N- | TYEPPPTAPT |
| | terminus | |
| 1267 | N22Q mutant of Hybrid hu- | RGEAETRECIYYNANWELERTQQSGLERCYGDKDKRRHCFATWKNISGSIEI |
| | ActRIIB-ECD (SEQ ID NO: | VKQGCWLDDINCYDRTDCVEKKDSPEVYFCCCEGNFCNERFTHLPEAGGPE |
| | 60) with 4 additional aa at N- | VTYEPPPTAPT |
| | terminus | |
| 1268 | N23Q mutant of Hybrid hu- | GRGEAETRECIYYNANWELERTQQSGLERCYGDKDKRRHCFATWKNISGSI |
| | ActRIIB-ECD (SEQ ID NO: | EIVKQGCWLDDINCYDRTDCVEKKDSPEVYFCCCEGNFCNERFTHLPEAGGP |
| | 60) with 5 additional aa at N- | EVTYEPPPTAPT |
| | terminus | |
| 1269 | N24Q mutant of Hybrid hu- | SGRGEAETRECIYYNANWELERTQQSGLERCYGDKDKRRHCFATWKNISGS |
| | ActRIIB-ECD (SEQ ID NO: | IEIVKQGCWLDDINCYDRTDCVEKKDSPEVYFCCCEGNFCNERFTHLPEAGG |
| | 60) with 6 additional aa at N- | PEVTYEPPPTAPT |
| | terminus | |
| 1270 | N19Q mutant of Hybrid hu- | AETRECIYYNANWELERTQQSGLERCYGDKDKRRHCFATWKNISGSIEIVKQ |
| | ActRIIB-ECD (SEQ ID NO: | GCWLDDINCYDRTDCVEKKDSPEVYFCCCEGNMCNERFTHLPEAGGPEVTY |
| | 61) with 1 additional aa at N- | EPPPTAPT |
| | terminus | |
| 1271 | N20Q mutant of Hybrid hu- | EAETRECIYYNANWELERTQQSGLERCYGDKDKRRHCFATWKNISGSIEIVK |
| | ActRIIB-ECD (SEQ ID NO: | QGCWLDDINCYDRTDCVEKKDSPEVYFCCCEGNMCNERFTHLPEAGGPEVT |
| | 61) with 2 additional aa at N- | YEPPPTAPT |
| | terminus | |
| 1272 | N21Q mutant of Hybrid hu- | GEAETRECIYYNANWELERTQQSGLERCYGDKDKRRHCFATWKNISGSIEIV |
| | ActRIIB-ECD (SEQ ID NO: | KQGCWLDDINCYDRTDCVEKKDSPEVYFCCCEGNMCNERFTHLPEAGGPEV |
| | 61) with 3 additional aa at N- | TYEPPPTAPT |
| | terminus | |
| 1273 | N22Q mutant of Hybrid hu- | RGEAETRECIYYNANWELERTQQSGLERCYGDKDKRRHCFATWKNISGSIEI |
| | ActRIIB-ECD (SEQ ID NO: | VKQGCWLDDINCYDRTDCVEKKDSPEVYFCCCEGNMCNERFTHLPEAGGPE |
| | 61) with 4 additional aa at N- | VTYEPPPTAPT |
| | terminus | |
| 1274 | N23Q mutant of Hybrid hu- | GRGEAETRECIYYNANWELERTQQSGLERCYGDKDKRRHCFATWKNISGSI |
| | ActRIIB-ECD (SEQ ID NO: | EIVKQGCWLDDINCYDRTDCVEKKDSPEVYFCCCEGNMCNERFTHLPEAGG |
| | 61) with 5 additional aa at N- | PEVTYEPPPTAPT |
| | terminus | |
| 1275 | N24Q mutant of Hybrid hu- | SGRGEAETRECIYYNANWELERTQQSGLERCYGDKDKRRHCFATWKNISGS |
| | ActRIIB-ECD (SEQ ID NO: | IEIVKQGCWLDDINCYDRTDCVEKKDSPEVYFCCCEGNMCNERFTHLPEAG |
| | 61) with 6 additional aa at N- | GPEVTYEPPPTAPT |
| | terminus | |
| 1276 | N19Q mutant of Hybrid hu- | AETRECIYYNANWELERTQQSGLERCEGEQDKRLHCFATWKNISGSIEIVKQ |
| | ActRIIB-ECD (SEQ ID NO: | GCWLDDINCYDRTDCVEKKDSPEVYFCCCEGNFCNERFTHLPEAGGPEVTY |
| | 62) with 1 additional aa at N- | EPPPTAPT |
| | terminus | |
| 1277 | N20Q mutant of Hybrid hu- | EAETRECIYYNANWELERTQQSGLERCEGEQDKRLHCFATWKNISGSIEIVK |
| | ActRIIB-ECD (SEQ ID NO: | QGCWLDDINCYDRTDCVEKKDSPEVYFCCCEGNFCNERFTHLPEAGGPEVT |
| | 62) with 2 additional aa at N- | YEPPPTAPT |
| | terminus | |
| 1278 | N21Q mutant of Hybrid hu- | GEAETRECIYYNANWELERTQQSGLERCEGEQDKRLHCFATWKNISGSIEIV |
| | ActRIIB-ECD (SEQ ID NO: | KQGCWLDDINCYDRTDCVEKKDSPEVYFCCCEGNFCNERFTHLPEAGGPEV |
| | 62) with 3 additional aa at N- | TYEPPPTAPT |
| | terminus | |
| 1279 | N22Q mutant of Hybrid hu- | RGEAETRECIYYNANWELERTQQSGLERCEGEQDKRLHCFATWKNISGSIEI |
| | ActRIIB-ECD (SEQ ID NO: | VKQGCWLDDINCYDRTDCVEKKDSPEVYFCCCEGNFCNERFTHLPEAGGPE |
| | 62) with 4 additional aa at N- | VTYEPPPTAPT |
| | terminus | |
| 1280 | N23Q mutant of Hybrid hu- | GRGEAETRECIYYNANWELERTQQSGLERCEGEQDKRLHCFATWKNISGSIE |
| | ActRIIB-ECD (SEQ ID NO: | IVKQGCWLDDINCYDRTDCVEKKDSPEVYFCCCEGNFCNERFTHLPEAGGPE |
| | 62) with 5 additional aa at N- | VTYEPPPTAPT |
| | terminus | |
| 1281 | N24Q mutant of Hybrid hu- | SGRGEAETRECIYYNANWELERTQQSGLERCEGEQDKRLHCFATWKNISGSI |
| | ActRIIB-ECD (SEQ ID NO: | EIVKQGCWLDDINCYDRTDCVEKKDSPEVYFCCCEGNFCNERFTHLPEAGGP |
| | 62) with 6 additional aa at N- | EVTYEPPPTAPT |
| | terminus | |
| 1282 | N19Q mutant of Hybrid hu- | AETRECIYYNANWELERTQQSGLERCEGEQDKRLHCFATWKNISGSIEIVKQ |
| | ActRIIB-ECD (SEQ ID NO: | GCWLDDINCYDRTDCVATEENPQVYFCCCEGNFCNERFTHLPEAGGPEVTY |
| | 63) with 1 additional aa at N- | EPPPTAPT |
| | terminus | |
| 1283 | N20Q mutant of Hybrid hu- | EAETRECIYYNANWELERTQQSGLERCEGEQDKRLHCFATWKNISGSIEIVK |
| | ActRIIB-ECD (SEQ ID NO: | QGCWLDDINCYDRTDCVATEENPQVYFCCCEGNFCNERFTHLPEAGGPEVT |
| | 63) with 2 additional aa at N- | YEPPPTAPT |
| | terminus | |
| 1284 | N21Q mutant of Hybrid hu- | GEAETRECIYYNANWELERTQQSGLERCEGEQDKRLHCFATWKNISGSIEIV |
| | ActRIIB-ECD (SEQ ID NO: | KQGCWLDDINCYDRTDCVATEENPQVYFCCCEGNFCNERFTHLPEAGGPEV |
| | 63) with 3 additional aa at N- | TYEPPPTAPT |
| | terminus | |
| 1285 | N22Q mutant of Hybrid hu- | RGEAETRECIYYNANWELERTQQSGLERCEGEQDKRLHCFATWKNISGSIEI |
| | ActRIIB-ECD (SEQ ID NO: | VKQGCWLDDINCYDRTDCVATEENPQVYFCCCEGNFCNERFTHLPEAGGPE |
| | 63) with 4 additional aa at N- | VTYEPPPTAPT |
| | terminus | |
| 1286 | N23Q mutant of Hybrid hu- | GRGEAETRECIYYNANWELERTQQSGLERCEGEQDKRLHCFATWKNISGSIE |
| | ActRIIB-ECD (SEQ ID NO: | IVKQGCWLDDINCYDRTDCVATEENPQVYFCCCEGNFCNERFTHLPEAGGP |
| | 63) with 5 additional aa at N- | EVTYEPPPTAPT |
| | terminus | |
| 1287 | N24Q mutant of Hybrid hu- | SGRGEAETRECIYYNANWELERTQQSGLERCEGEQDKRLHCFATWKNISGSI |
| | ActRIIB-ECD (SEQ ID NO: | EIVKQGCWLDDINCYDRTDCVATEENPQVYFCCCEGNFCNERFTHLPEAGG |
| | 63) with 6 additional aa at N- | PEVTYEPPPTAPT |
| | terminus | |
| 1288 | N19Q mutant of Hybrid hu- | AETRECIYYNANWELERTQQSGLERCEGEQDKRLHCFATWKNISGSIEIVKQ |
| | ActRIIB-ECD (SEQ ID NO: | GCWLDDFNCYDRTDCVATEENPQVYFCCCEGNFCNERFTHLPEAGGPEVTY |
| | 64) with 1 additional aa at N- | EPPPTAPT |
| | terminus | |
| 1289 | N20Q mutant of Hybrid hu- | EAETRECIYYNANWELERTQQSGLERCEGEQDKRLHCFATWKNISGSIEIVK |
| | ActRIIB-ECD (SEQ ID NO: | QGCWLDDFNCYDRTDCVATEENPQVYFCCCEGNFCNERFTHLPEAGGPEVT |
| | 64) with 2 additional aa at N- | YEPPPTAPT |
| | terminus | |
| 1290 | N21Q mutant of Hybrid hu- | GEAETRECIYYNANWELERTQQSGLERCEGEQDKRLHCFATWKNISGSIEIV |
| | ActRIIB-ECD (SEQ ID NO: | KQGCWLDDFNCYDRTDCVATEENPQVYFCCCEGNFCNERFTHLPEAGGPEV |
| | 64) with 3 additional aa at N- | TYEPPPTAPT |
| | terminus | |
| 1291 | N22Q mutant of Hybrid hu- | RGEAETRECIYYNANWELERTQQSGLERCEGEQDKRLHCFATWKNISGSIEI |
| | ActRIIB-ECD (SEQ ID NO: | VKQGCWLDDFNCYDRTDCVATEENPQVYFCCCEGNFCNERFTHLPEAGGPE |
| | 64) with 4 additional aa at N- | VTYEPPPTAPT |
| | terminus | |
| 1292 | N23Q mutant of Hybrid hu- | GRGEAETRECIYYNANWELERTQQSGLERCEGEQDKRLHCFATWKNISGSIE |
| | ActRIIB-ECD (SEQ ID NO: | IVKQGCWLDDFNCYDRTDCVATEENPQVYFCCCEGNFCNERFTHLPEAGGP |
| | 64) with 5 additional aa at N- | EVTYEPPPTAPT |
| | terminus | |
| 1293 | N24Q mutant of Hybrid hu- | SGRGEAETRECIYYNANWELERTQQSGLERCEGEQDKRLHCFATWKNISGSI |
| | ActRIIB-ECD (SEQ ID NO: | EIVKQGCWLDDFNCYDRTDCVATEENPQVYFCCCEGNFCNERFTHLPEAGG |
| | 64) with 6 additional aa at N- | PEVTYEPPPTAPT |
| | terminus | |
| 1294 | N19Q mutant of Hybrid hu- | AETRECIYYNANWELERTQQSGLERCEGEQDKRLHCFATWKNISGSIEIVKQ |
| | ActRIIB-ECD (SEQ ID NO: | GCWLDDFNCYDRQECVATEENPQVYFCCCEGNFCNERFTHLPEAGGPEVTY |
| | 65) with 1 additional aa at N- | EPPPTAPT |
| | terminus | |
| 1295 | N20Q mutant of Hybrid hu- | EAETRECIYYNANWELERTQQSGLERCEGEQDKRLHCFATWKNISGSIEIVK |
| | ActRIIB-ECD (SEQ ID NO: | QGCWLDDFNCYDRQECVATEENPQVYFCCCEGNFCNERFTHLPEAGGPEVT |
| | 65) with 2 additional aa at N- | YEPPPTAPT |
| | terminus | |
| 1296 | N21Q mutant of Hybrid hu- | GEAETRECIYYNANWELERTQQSGLERCEGEQDKRLHCFATWKNISGSIEIV |
| | ActRIIB-ECD (SEQ ID NO: | KQGCWLDDFNCYDRQECVATEENPQVYFCCCEGNFCNERFTHLPEAGGPEV |
| | 65) with 3 additional aa at N- | TYEPPPTAPT |
| | terminus | |
| 1297 | N22Q mutant of Hybrid hu- | RGEAETRECIYYNANWELERTQQSGLERCEGEQDKRLHCFATWKNISGSIEI |
| | ActRIIB-ECD (SEQ ID NO: | VKQGCWLDDFNCYDRQECVATEENPQVYFCCCEGNFCNERFTHLPEAGGPE |
| | 65) with 4 additional aa at N- | VTYEPPPTAPT |
| | terminus | |
| 1298 | N23Q mutant of Hybrid hu- | GRGEAETRECIYYNANWELERTQQSGLERCEGEQDKRLHCFATWKNISGSIE |
| | ActRIIB-ECD (SEQ ID NO: | IVKQGCWLDDFNCYDRQECVATEENPQVYFCCCEGNFCNERFTHLPEAGGP |
| | 65) with 5 additional aa at N- | EVTYEPPPTAPT |
| | terminus | |
| 1299 | N24Q mutant of Hybrid hu- | SGRGEAETRECIYYNANWELERTQQSGLERCEGEQDKRLHCFATWKNISGSI |
| | ActRIIB-ECD (SEQ ID NO: | EIVKQGCWLDDFNCYDRQECVATEENPQVYFCCCEGNFCNERFTHLPEAGG |
| | 65) with 6 additional aa at N- | PEVTYEPPPTAPT |
| | terminus | |
| 1300 | N19Q mutant of Hybrid hu- | AETQECIYYNANWELERTQQSGLERCYGDKDKRRHCYASWRNSSGTIELVK |
| | ActRIIB-ECD (SEQ ID NO: | KGCWLDDINCYDRTDCVEKKDSPEVYFCCCEGNFCNERFTHLPEAGGPEVT |
| | 66) with 1 additional aa at N- | YEPPPTAPT |
| | terminus | |
| 1301 | N20Q mutant of Hybrid hu- | EAETQECIYYNANWELERTQQSGLERCYGDKDKRRHCYASWRNSSGTIELV |
| | ActRIIB-ECD (SEQ ID NO: | KKGCWLDDINCYDRTDCVEKKDSPEVYFCCCEGNFCNERFTHLPEAGGPEV |
| | 66) with 2 additional aa at N- | TYEPPPTAPT |
| | terminus | |
| 1302 | N21Q mutant of Hybrid hu- | GEAETQECIYYNANWELERTQQSGLERCYGDKDKRRHCYASWRNSSGTIEL |
| | ActRIIB-ECD (SEQ ID NO: | VKKGCWLDDINCYDRTDCVEKKDSPEVYFCCCEGNFCNERFTHLPEAGGPE |
| | 66) with 3 additional aa at N- | VTYEPPPTAPT |
| | terminus | |
| 1303 | N22Q mutant of Hybrid hu- | RGEAETQECIYYNANWELERTQQSGLERCYGDKDKRRHCYASWRNSSGTIE |
| | ActRIIB-ECD (SEQ ID NO: | LVKKGCWLDDINCYDRTDCVEKKDSPEVYFCCCEGNFCNERFTHLPEAGGP |
| | 66) with 4 additional aa at N- | EVTYEPPPTAPT |
| | terminus | |
| 1304 | N23Q mutant of Hybrid hu- | GRGEAETQECIYYNANWELERTQQSGLERCYGDKDKRRHCYASWRNSSGTI |
| | ActRIIB-ECD (SEQ ID NO: | ELVKKGCWLDDINCYDRTDCVEKKDSPEVYFCCCEGNFCNERFTHLPEAGG |
| | 66) with 5 additional aa at N- | PEVTYEPPPTAPT |
| | terminus | |
| 1305 | N24Q mutant of Hybrid hu- | SGRGEAETQECIYYNANWELERTQQSGLERCYGDKDKRRHCYASWRNSSG |
| | ActRIIB-ECD (SEQ ID NO: | TIELVKKGCWLDDINCYDRTDCVEKKDSPEVYFCCCEGNFCNERFTHLPEAG |
| | 66) with 6 additional aa at N- | GPEVTYEPPPTAPT |
| | terminus | |
| 1306 | N19Q mutant of Hybrid hu- | AETQECIYYNANWELERTQQSGLERCYGDKDKRRHCYASWRNSSGTIELVK |
| | ActRIIB-ECD (SEQ ID NO: | KGCWLDDINCYDRTDCVEKKDSPEVYFCCCEGNMCNERFTHLPEAGGPEVT |
| | 67) with 1 additional aa at N- | YEPPPTAPT |
| | terminus | |
| 1307 | N20Q mutant of Hybrid hu- | EAETQECIYYNANWELERTQQSGLERCYGDKDKRRHCYASWRNSSGTIELV |
| | ActRIIB-ECD (SEQ ID NO: | KKGCWLDDINCYDRTDCVEKKDSPEVYFCCCEGNMCNERFTHLPEAGGPEV |
| | 67) with 2 additional aa at N- | TYEPPPTAPT |
| | terminus | |
| 1308 | N21Q mutant of Hybrid hu- | GEAETQECIYYNANWELERTQQSGLERCYGDKDKRRHCYASWRNSSGTIEL |
| | ActRIIB-ECD (SEQ ID NO: | VKKGCWLDDINCYDRTDCVEKKDSPEVYFCCCEGNMCNERFTHLPEAGGPE |
| | 67) with 3 additional aa at N- | VTYEPPPTAPT |
| | terminus | |
| 1309 | N22Q mutant of Hybrid hu- | RGEAETQECIYYNANWELERTQQSGLERCYGDKDKRRHCYASWRNSSGTIE |
| | ActRIIB-ECD (SEQ ID NO: | LVKKGCWLDDINCYDRTDCVEKKDSPEVYFCCCEGNMCNERFTHLPEAGGP |
| | 67) with 4 additional aa at N- | EVTYEPPPTAPT |
| | terminus | |
| 1310 | N23Q mutant of Hybrid hu- | GRGEAETQECIYYNANWELERTQQSGLERCYGDKDKRRHCYASWRNSSGTI |
| | ActRIIB-ECD (SEQ ID NO: | ELVKKGCWLDDINCYDRTDCVEKKDSPEVYFCCCEGNMCNERFTHLPEAG |
| | 67) with 5 additional aa at N- | GPEVTYEPPPTAPT |
| | terminus | |
| 1311 | N24Q mutant of Hybrid hu- | SGRGEAETQECIYYNANWELERTQQSGLERCYGDKDKRRHCYASWRNSSG |
| | ActRIIB-ECD (SEQ ID NO: | TIELVKKGCWLDDINCYDRTDCVEKKDSPEVYFCCCEGNMCNERFTHLPEA |
| | 67) with 6 additional aa at N- | GGPEVTYEPPPTAPT |
| | terminus | |
| 1312 | N19Q mutant of Hybrid hu- | AETQECIYYNANWELERTQQSGLERCYGDKDKRRHCFATWKNISGSIEIVKQ |
| | ActRIIB-ECD (SEQ ID NO: | GCWLDDINCYDRTDCVEKKDSPEVYFCCCEGNMCNERFTHLPEAGGPEVTY |
| | 68) with 1 additional aa at N- | EPPPTAPT |
| | terminus | |
| 1313 | N20Q mutant of Hybrid hu- | EAETQECIYYNANWELERTQQSGLERCYGDKDKRRHCFATWKNISGSIEIVK |
| | ActRIIB-ECD (SEQ ID NO: | QGCWLDDINCYDRTDCVEKKDSPEVYFCCCEGNMCNERFTHLPEAGGPEVT |
| | 68) with 2 additional aa at N- | YEPPPTAPT |
| | terminus | |
| 1314 | N21Q mutant of Hybrid hu- | GEAETQECIYYNANWELERTQQSGLERCYGDKDKRRHCFATWKNISGSIEIV |
| | ActRIIB-ECD (SEQ ID NO: | KQGCWLDDINCYDRTDCVEKKDSPEVYFCCCEGNMCNERFTHLPEAGGPEV |
| | 68) with 3 additional aa at N- | TYEPPPTAPT |
| | terminus | |
| 1315 | N22Q mutant of Hybrid hu- | RGEAETQECIYYNANWELERTQQSGLERCYGDKDKRRHCFATWKNISGSIEI |
| | ActRIIB-ECD (SEQ ID NO: | VKQGCWLDDINCYDRTDCVEKKDSPEVYFCCCEGNMCNERFTHLPEAGGPE |
| | 68) with 4 additional aa at N- | VTYEPPPTAPT |
| | terminus | |
| 1316 | N23Q mutant of Hybrid hu- | GRGEAETQECIYYNANWELERTQQSGLERCYGDKDKRRHCFATWKNISGSI |
| | ActRIIB-ECD (SEQ ID NO: | EIVKQGCWLDDINCYDRTDCVEKKDSPEVYFCCCEGNMCNERFTHLPEAGG |
| | 68) with 5 additional aa at N- | PEVTYEPPPTAPT |
| | terminus | |
| 1317 | N24Q mutant of Hybrid hu- | SGRGEAETQECIYYNANWELERTQQSGLERCYGDKDKRRHCFATWKNISGS |
| | ActRIIB-ECD (SEQ ID NO: | IEIVKQGCWLDDINCYDRTDCVEKKDSPEVYFCCCEGNMCNERFTHLPEAG |
| | 68) with 6 additional aa at N- | GPEVTYEPPPTAPT |
| | terminus | |
| 1318 | N19Q mutant of Hybrid hu- | AETQECIYYNANWELERTQQSGLERCYGDKDKRRHCFATWKNISGSIEIVKQ |
| | ActRIIB-ECD (SEQ ID NO: | GCWLDDINCYDRTDCVEKKDSPEVYFCCCEGNFCNERFTHLPEAGGPEVTY |
| | 69) with 1 additional aa at N- | EPPPTAPT |
| | terminus | |
| 1319 | N20Q mutant of Hybrid hu- | EAETQECIYYNANWELERTQQSGLERCYGDKDKRRHCFATWKNISGSIEIVK |
| | ActRIIB-ECD (SEQ ID NO: | QGCWLDDINCYDRTDCVEKKDSPEVYFCCCEGNFCNERFTHLPEAGGPEVT |
| | 69) with 2 additional aa at N- | YEPPPTAPT |
| | terminus | |
| 1320 | N21Q mutant of Hybrid hu- | GEAETQECIYYNANWELERTQQSGLERCYGDKDKRRHCFATWKNISGSIEIV |
| | ActRIIB-ECD (SEQ ID NO: | KQGCWLDDINCYDRTDCVEKKDSPEVYFCCCEGNFCNERFTHLPEAGGPEV |
| | 69) with 3 additional aa at N- | TYEPPPTAPT |
| | terminus | |
| 1321 | N22Q mutant of Hybrid hu- | RGEAETQECIYYNANWELERTQQSGLERCYGDKDKRRHCFATWKNISGSIEI |
| | ActRIIB-ECD (SEQ ID NO: | VKQGCWLDDINCYDRTDCVEKKDSPEVYFCCCEGNFCNERFTHLPEAGGPE |
| | 69) with 4 additional aa at N- | VTYEPPPTAPT |
| | terminus | |
| 1322 | N23Q mutant of Hybrid hu- | GRGEAETQECIYYNANWELERTQQSGLERCYGDKDKRRHCFATWKNISGSI |
| | ActRIIB-ECD (SEQ ID NO: | EIVKQGCWLDDINCYDRTDCVEKKDSPEVYFCCCEGNFCNERFTHLPEAGGP |
| | 69) with 5 additional aa at N- | EVTYEPPPTAPT |
| | terminus | |
| 1323 | N24Q mutant of Hybrid hu- | SGRGEAETQECIYYNANWELERTQQSGLERCYGDKDKRRHCFATWKNISGS |
| | ActRIIB-ECD (SEQ ID NO: | IEIVKQGCWLDDINCYDRTDCVEKKDSPEVYFCCCEGNFCNERFTHLPEAGG |
| | 69) with 6 additional aa at N- | PEVTYEPPPTAPT |
| | terminus | |
| 1324 | N19Q mutant of Hybrid hu- | AETRECLFFNANWEKDRTQQTGVEPCEGEQDKRLHCFATWKNISGSIEIVKQ |
| | ActRIIB-ECD (SEQ ID NO: | GCWLDDINCYDRTDCVEKKDSPEVYFCCCEGNFCNERFTHLPEAGGPEVTY |
| | 70) with 1 additional aa at N- | EPPPTAPT |
| | terminus | |
| 1325 | N20Q mutant of Hybrid hu- | EAETRECLFFNANWEKDRTQQTGVEPCEGEQDKRLHCFATWKNISGSIEIVK |
| | ActRIIB-ECD (SEQ ID NO: | QGCWLDDINCYDRTDCVEKKDSPEVYFCCCEGNFCNERFTHLPEAGGPEVT |
| | 70) with 2 additional aa at N- | YEPPPTAPT |
| | terminus | |
| 1326 | N21Q mutant of Hybrid hu- | GEAETRECLFFNANWEKDRTQQTGVEPCEGEQDKRLHCFATWKNISGSIEIV |
| | ActRIIB-ECD (SEQ ID NO: | KQGCWLDDINCYDRTDCVEKKDSPEVYFCCCEGNFCNERFTHLPEAGGPEV |
| | 70) with 3 additional aa at N- | TYEPPPTAPT |
| | terminus | |
| 1327 | N22Q mutant of Hybrid hu- | RGEAETRECLFFNANWEKDRTQQTGVEPCEGEQDKRLHCFATWKNISGSIEI |
| | ActRIIB-ECD (SEQ ID NO: | VKQGCWLDDINCYDRTDCVEKKDSPEVYFCCCEGNFCNERFTHLPEAGGPE |
| | 70) with 4 additional aa at N- | VTYEPPPTAPT |
| | terminus | |
| 1328 | N23Q mutant of Hybrid hu- | GRGEAETRECLFFNANWEKDRTQQTGVEPCEGEQDKRLHCFATWKNISGSI |
| | ActRIIB-ECD (SEQ ID NO: | EIVKQGCWLDDINCYDRTDCVEKKDSPEVYFCCCEGNFCNERFTHLPEAGGP |
| | 70) with 5 additional aa at N- | EVTYEPPPTAPT |
| | terminus | |
| 1329 | N24Q mutant of Hybrid hu- | SGRGEAETRECLFFNANWEKDRTQQTGVEPCEGEQDKRLHCFATWKNISGSI |
| | ActRIIB-ECD (SEQ ID NO: | EIVKQGCWLDDINCYDRTDCVEKKDSPEVYFCCCEGNFCNERFTHLPEAGGP |
| | 70) with 6 additional aa at N- | EVTYEPPPTAPT |
| | terminus | |
| 1330 | N19Q mutant of Hybrid hu- | AETRECLFFNANWEKDRTQQSGVEPCEGEQDKRLHCYASWRNSSGTIELVK |
| | ActRIIB-ECD (SEQ ID NO: | KGCWLDDINCYDRTDCVEKKDSPEVYFCCCEGNFCNERFTHLPEAGGPEVT |
| | 71) with 1 additional aa at N- | YEPPPTAPT |
| | terminus | |
| 1331 | N20Q mutant of Hybrid hu- | EAETRECLFFNANWEKDRTQQSGVEPCEGEQDKRLHCYASWRNSSGTIELV |
| | ActRIIB-ECD (SEQ ID NO: | KKGCWLDDINCYDRTDCVEKKDSPEVYFCCCEGNFCNERFTHLPEAGGPEV |
| | 71) with 2 additional aa at N- | TYEPPPTAPT |
| | terminus | |
| 1332 | N21Q mutant of Hybrid hu- | GEAETRECLFFNANWEKDRTQQSGVEPCEGEQDKRLHCYASWRNSSGTIEL |
| | ActRIIB-ECD (SEQ ID NO: | VKKGCWLDDINCYDRTDCVEKKDSPEVYFCCCEGNFCNERFTHLPEAGGPE |
| | 71) with 3 additional aa at N- | VTYEPPPTAPT |
| | terminus | |
| 1333 | N22Q mutant of Hybrid hu- | RGEAETRECLFFNANWEKDRTQQSGVEPCEGEQDKRLHCYASWRNSSGTIE |
| | ActRIIB-ECD (SEQ ID NO: | LVKKGCWLDDINCYDRTDCVEKKDSPEVYFCCCEGNFCNERFTHLPEAGGP |
| | 71) with 4 additional aa at N- | EVTYEPPPTAPT |
| | terminus | |
| 1334 | N23Q mutant of Hybrid hu- | GRGEAETRECLFFNANWEKDRTQQSGVEPCEGEQDKRLHCYASWRNSSGTI |
| | ActRIIB-ECD (SEQ ID NO: | ELVKKGCWLDDINCYDRTDCVEKKDSPEVYFCCCEGNFCNERFTHLPEAGG |
| | 71) with 5 additional aa at N- | PEVTYEPPPTAPT |
| | terminus | |
| 1335 | N24Q mutant of Hybrid hu- | SGRGEAETRECLFFNANWEKDRTQQSGVEPCEGEQDKRLHCYASWRNSSGT |
| | ActRIIB-ECD (SEQ ID NO: | IELVKKGCWLDDINCYDRTDCVEKKDSPEVYFCCCEGNFCNERFTHLPEAG |
| | 71) with 6 additional aa at N- | GPEVTYEPPPTAPT |
| | terminus | |
| 1336 | N19Q mutant of Hybrid hu- | AETRECLFFNANWEKDRTQQSGVEPCYGDKDKRRHCYASWRNSSGTIELVK |
| | ActRIIB-ECD (SEQ ID NO: | KGCWLDDINCYDRTDCVEKKDSPEVYFCCCEGNFCNERFTHLPEAGGPEVT |
| | 72) with 1 additional aa at N- | YEPPPTAPT |
| | terminus | |
| 1337 | N20Q mutant of Hybrid hu- | EAETRECLFFNANWEKDRTQQSGVEPCYGDKDKRRHCYASWRNSSGTIELV |
| | ActRIIB-ECD (SEQ ID NO: | KKGCWLDDINCYDRTDCVEKKDSPEVYFCCCEGNFCNERFTHLPEAGGPEV |
| | 72) with 2 additional aa at N- | TYEPPPTAPT |
| | terminus | |
| 1338 | N21Q mutant of Hybrid hu- | GEAETRECLFFNANWEKDRTQQSGVEPCYGDKDKRRHCYASWRNSSGTIEL |
| | ActRIIB-ECD (SEQ ID NO: | VKKGCWLDDINCYDRTDCVEKKDSPEVYFCCCEGNFCNERFTHLPEAGGPE |
| | 72) with 3 additional aa at N- | VTYEPPPTAPT |
| | terminus | |
| 1339 | N22Q mutant of Hybrid hu- | RGEAETRECLFFNANWEKDRTQQSGVEPCYGDKDKRRHCYASWRNSSGTIE |
| | ActRIIB-ECD (SEQ ID NO: | LVKKGCWLDDINCYDRTDCVEKKDSPEVYFCCCEGNFCNERFTHLPEAGGP |
| | 72) with 4 additional aa at N- | EVTYEPPPTAPT |
| | terminus | |
| 1340 | N23Q mutant of Hybrid hu- | GRGEAETRECLFFNANWEKDRTQQSGVEPCYGDKDKRRHCYASWRNSSGTI |
| | ActRIIB-ECD (SEQ ID NO: | ELVKKGCWLDDINCYDRTDCVEKKDSPEVYFCCCEGNFCNERFTHLPEAGG |
| | 72) with 5 additional aa at N- | PEVTYEPPPTAPT |
| | terminus | |
| 1341 | N24Q mutant of Hybrid hu- | SGRGEAETRECLFFNANWEKDRTQQSGVEPCYGDKDKRRHCYASWRNSSG |
| | ActRIIB-ECD (SEQ ID NO: | TIELVKKGCWLDDINCYDRTDCVEKKDSPEVYFCCCEGNFCNERFTHLPEAG |
| | 72) with 6 additional aa at N- | GPEVTYEPPPTAPT |
| | terminus | |
| 1342 | N19Q mutant of Hybrid hu- | AETRECIYYNANWELERTQQSGLERCYGDKDKRRHCYASWRNSSGTIELVK |
| | ActRIIB-ECD (SEQ ID NO: | KGCWLDDFNCYDRTDCVATEENPQVYFCCCEGNFCNERFTHLPEAGGPEVT |
| | 73) with 1 additional aa at N- | YEPPPTAPT |
| | terminus | |
| 1343 | N20Q mutant of Hybrid hu- | EAETRECIYYNANWELERTQQSGLERCYGDKDKRRHCYASWRNSSGTIELV |
| | ActRIIB-ECD (SEQ ID NO: | KKGCWLDDFNCYDRTDCVATEENPQVYFCCCEGNFCNERFTHLPEAGGPEV |
| | 73) with 2 additional aa at N- | TYEPPPTAPT |
| | terminus | |
| 1344 | N21Q mutant of Hybrid hu- | GEAETRECIYYNANWELERTQQSGLERCYGDKDKRRHCYASWRNSSGTIEL |
| | ActRIIB-ECD (SEQ ID NO: | VKKGCWLDDFNCYDRTDCVATEENPQVYFCCCEGNFCNERFTHLPEAGGPE |
| | 73) with 3 additional aa at N- | VTYEPPPTAPT |
| | terminus | |
| 1345 | N22Q mutant of Hybrid hu- | RGEAETRECIYYNANWELERTQQSGLERCYGDKDKRRHCYASWRNSSGTIE |
| | ActRIIB-ECD (SEQ ID NO: | LVKKGCWLDDFNCYDRTDCVATEENPQVYFCCCEGNFCNERFTHLPEAGGP |
| | 73) with 4 additional aa at N- | EVTYEPPPTAPT |
| | terminus | |
| 1346 | N23Q mutant of Hybrid hu- | GRGEAETRECIYYNANWELERTQQSGLERCYGDKDKRRHCYASWRNSSGTI |
| | ActRIIB-ECD (SEQ ID NO: | ELVKKGCWLDDFNCYDRTDCVATEENPQVYFCCCEGNFCNERFTHLPEAGG |
| | 73) with 5 additional aa at N- | PEVTYEPPPTAPT |
| | terminus | |
| 1347 | N24Q mutant of Hybrid hu- | SGRGEAETRECIYYNANWELERTQQSGLERCYGDKDKRRHCYASWRNSSG |
| | ActRIIB-ECD (SEQ ID NO: | TIELVKKGCWLDDFNCYDRTDCVATEENPQVYFCCCEGNFCNERFTHLPEA |
| | 73) with 6 additional aa at N- | GGPEVTYEPPPTAPT |
| | terminus | |
| 1348 | N19Q mutant of Hybrid hu- | AETRECIYYNANWELERTQQSGLERCYGDKDKRRHCYASWRNSSGTIELVK |
| | ActRIIB-ECD (SEQ ID NO: | QGCWLDDFNCYDRTDCVATEENPQVYFCCCEGNFCNERFTHLPEAGGPEVT |
| | 74) with 1 additional aa at N- | YEPPPTAPT |
| | terminus | |
| 1349 | N20Q mutant of Hybrid hu- | EAETRECIYYNANWELERTQQSGLERCYGDKDKRRHCYASWRNSSGTIELV |
| | ActRIIB-ECD (SEQ ID NO: | KQGCWLDDFNCYDRTDCVATEENPQVYFCCCEGNFCNERFTHLPEAGGPEV |
| | 74) with 2 additional aa at N- | TYEPPPTAPT |
| | terminus | |
| 1350 | N21Q mutant of Hybrid hu- | GEAETRECIYYNANWELERTQQSGLERCYGDKDKRRHCYASWRNSSGTIEL |
| | ActRIIB-ECD (SEQ ID NO: | VKQGCWLDDFNCYDRTDCVATEENPQVYFCCCEGNFCNERFTHLPEAGGPE |
| | 74) with 3 additional aa at N- | VTYEPPPTAPT |
| | terminus | |
| 1351 | N22Q mutant of Hybrid hu- | RGEAETRECIYYNANWELERTQQSGLERCYGDKDKRRHCYASWRNSSGTIE |
| | ActRIIB-ECD (SEQ ID NO: | LVKQGCWLDDFNCYDRTDCVATEENPQVYFCCCEGNFCNERFTHLPEAGGP |
| | 74) with 4 additional aa at N- | EVTYEPPPTAPT |
| | terminus | |
| 1352 | N23Q mutant of Hybrid hu- | GRGEAETRECIYYNANWELERTQQSGLERCYGDKDKRRHCYASWRNSSGTI |
| | ActRIIB-ECD (SEQ ID NO: | ELVKQGCWLDDFNCYDRTDCVATEENPQVYFCCCEGNFCNERFTHLPEAGG |
| | 74) with 5 additional aa at N- | PEVTYEPPPTAPT |
| | terminus | |
| 1353 | N24Q mutant of Hybrid hu- | SGRGEAETRECIYYNANWELERTQQSGLERCYGDKDKRRHCYASWRNSSG |
| | ActRIIB-ECD (SEQ ID NO: | TIELVKQGCWLDDFNCYDRTDCVATEENPQVYFCCCEGNFCNERFTHLPEA |
| | 74) with 6 additional aa at N- | GGPEVTYEPPPTAPT |
| | terminus | |
| 1354 | N19Q mutant of Hybrid hu- | AETRECIYYNANWELERTQQSGLERCYGDKDKRRHCYASWRNSSGTIEIVK |
| | ActRIIB-ECD (SEQ ID NO: | KGCWLDDFNCYDRTDCVATEENPQVYFCCCEGNFCNERFTHLPEAGGPEVT |
| | 75) with 1 additional aa at N- | YEPPPTAPT |
| | terminus | |
| 1355 | N20Q mutant of Hybrid hu- | EAETRECIYYNANWELERTQQSGLERCYGDKDKRRHCYASWRNSSGTIEIV |
| | ActRIIB-ECD (SEQ ID NO: | KKGCWLDDFNCYDRTDCVATEENPQVYFCCCEGNFCNERFTHLPEAGGPEV |
| | 75) with 2 additional aa at N- | TYEPPPTAPT |
| | terminus | |
| 1356 | N21Q mutant of Hybrid hu- | GEAETRECIYYNANWELERTQQSGLERCYGDKDKRRHCYASWRNSSGTIEI |
| | ActRIIB-ECD (SEQ ID NO: | VKKGCWLDDFNCYDRTDCVATEENPQVYFCCCEGNFCNERFTHLPEAGGPE |
| | 75) with 3 additional aa at N- | VTYEPPPTAPT |
| | terminus | |
| 1357 | N22Q mutant of Hybrid hu- | RGEAETRECIYYNANWELERTQQSGLERCYGDKDKRRHCYASWRNSSGTIE |
| | ActRIIB-ECD (SEQ ID NO: | IVKKGCWLDDFNCYDRTDCVATEENPQVYFCCCEGNFCNERFTHLPEAGGP |
| | 75) with 4 additional aa at N- | EVTYEPPPTAPT |
| | terminus | |
| 1358 | N23Q mutant of Hybrid hu- | GRGEAETRECIYYNANWELERTQQSGLERCYGDKDKRRHCYASWRNSSGTI |
| | ActRIIB-ECD (SEQ ID NO: | EIVKKGCWLDDFNCYDRTDCVATEENPQVYFCCCEGNFCNERFTHLPEAGG |
| | 75) with 5 additional aa at N- | PEVTYEPPPTAPT |
| | terminus | |
| 1359 | N24Q mutant of Hybrid hu- | SGRGEAETRECIYYNANWELERTQQSGLERCYGDKDKRRHCYASWRNSSG |
| | ActRIIB-ECD (SEQ ID NO: | TIEIVKKGCWLDDFNCYDRTDCVATEENPQVYFCCCEGNFCNERFTHLPEAG |
| | 75) with 6 additional aa at N- | GPEVTYEPPPTAPT |
| | terminus | |
| 1360 | N19Q mutant of Hybrid hu- | AETRECIYYNANWELERTQQSGLERCYGDKDKRRHCYASWRNSSGSIELVK |
| | ActRIIB-ECD (SEQ ID NO: | KGCWLDDFNCYDRTDCVATEENPQVYFCCCEGNFCNERFTHLPEAGGPEVT |
| | 76) with 1 additional aa at N- | YEPPPTAPT |
| | terminus | |
| 1361 | N20Q mutant of Hybrid hu- | EAETRECIYYNANWELERTQQSGLERCYGDKDKRRHCYASWRNSSGSIELV |
| | ActRIIB-ECD (SEQ ID NO: | KKGCWLDDFNCYDRTDCVATEENPQVYFCCCEGNFCNERFTHLPEAGGPEV |
| | 76) with 2 additional aa at N- | TYEPPPTAPT |
| | terminus | |
| 1362 | N21Q mutant of Hybrid hu- | GEAETRECIYYNANWELERTQQSGLERCYGDKDKRRHCYASWRNSSGSIEL |
| | ActRIIB-ECD (SEQ ID NO: | VKKGCWLDDFNCYDRTDCVATEENPQVYFCCCEGNFCNERFTHLPEAGGPE |
| | 76) with 3 additional aa at N- | VTYEPPPTAPT |
| | terminus | |
| 1363 | N22Q mutant of Hybrid hu- | RGEAETRECIYYNANWELERTQQSGLERCYGDKDKRRHCYASWRNSSGSIE |
| | ActRIIB-ECD (SEQ ID NO: | LVKKGCWLDDFNCYDRTDCVATEENPQVYFCCCEGNFCNERFTHLPEAGGP |
| | 76) with 4 additional aa at N- | EVTYEPPPTAPT |
| | terminus | |
| 1364 | N23Q mutant of Hybrid hu- | GRGEAETRECIYYNANWELERTQQSGLERCYGDKDKRRHCYASWRNSSGSI |
| | ActRIIB-ECD (SEQ ID NO: | ELVKKGCWLDDFNCYDRTDCVATEENPQVYFCCCEGNFCNERFTHLPEAGG |
| | 76) with 5 additional aa at N- | PEVTYEPPPTAPT |
| | terminus | |
| 1365 | N24Q mutant of Hybrid hu- | SGRGEAETRECIYYNANWELERTQQSGLERCYGDKDKRRHCYASWRNSSGS |
| | ActRIIB-ECD (SEQ ID NO: | IELVKKGCWLDDFNCYDRTDCVATEENPQVYFCCCEGNFCNERFTHLPEAG |
| | 76) with 6 additional aa at N- | GPEVTYEPPPTAPT |
| | terminus | |
| 1366 | N19Q mutant of Hybrid hu- | AETRECIYYNANWELERTQQSGLERCYGDKDKRRHCYASWRNSSGSIEIVK |
| | ActRIIB-ECD (SEQ ID NO: | KGCWLDDFNCYDRTDCVATEENPQVYFCCCEGNFCNERFTHLPEAGGPEVT |
| | 77) with 1 additional aa at N- | YEPPPTAPT |
| | terminus | |
| 1367 | N20Q mutant of Hybrid hu- | EAETRECIYYNANWELERTQQSGLERCYGDKDKRRHCYASWRNSSGSIEIV |
| | ActRIIB-ECD (SEQ ID NO: | KKGCWLDDFNCYDRTDCVATEENPQVYFCCCEGNFCNERFTHLPEAGGPEV |
| | 77) with 2 additional aa at N- | TYEPPPTAPT |
| | terminus | |
| 1368 | N21Q mutant of Hybrid hu- | GEAETRECIYYNANWELERTQQSGLERCYGDKDKRRHCYASWRNSSGSIEI |
| | ActRIIB-ECD (SEQ ID NO: | VKKGCWLDDFNCYDRTDCVATEENPQVYFCCCEGNFCNERFTHLPEAGGPE |
| | 77) with 3 additional aa at N- | VTYEPPPTAPT |
| | terminus | |
| 1369 | N22Q mutant of Hybrid hu- | RGEAETRECIYYNANWELERTQQSGLERCYGDKDKRRHCYASWRNSSGSIEI |
| | ActRIIB-ECD (SEQ ID NO: | VKKGCWLDDFNCYDRTDCVATEENPQVYFCCCEGNFCNERFTHLPEAGGPE |
| | 77) with 4 additional aa at N- | VTYEPPPTAPT |
| | terminus | |
| 1370 | N23Q mutant of Hybrid hu- | GRGEAETRECIYYNANWELERTQQSGLERCYGDKDKRRHCYASWRNSSGSI |
| | ActRIIB-ECD (SEQ ID NO: | EIVKKGCWLDDFNCYDRTDCVATEENPQVYFCCCEGNFCNERFTHLPEAGG |
| | 77) with 5 additional aa at N- | PEVTYEPPPTAPT |
| | terminus | |
| 1371 | N24Q mutant of Hybrid hu- | SGRGEAETRECIYYNANWELERTQQSGLERCYGDKDKRRHCYASWRNSSGS |
| | ActRIIB-ECD (SEQ ID NO: | IEIVKKGCWLDDFNCYDRTDCVATEENPQVYFCCCEGNFCNERFTHLPEAG |
| | 77) with 6 additional aa at N- | GPEVTYEPPPTAPT |
| | terminus | |
| 1372 | N19Q mutant of Hybrid hu- | AETRECIYYNANWELERTQQSGLERCYGDKDKRRHCYASWRNSSGSIEIVK |
| | ActRIIB-ECD (SEQ ID NO: | QGCWLDDFNCYDRTDCVATEENPQVYFCCCEGNFCNERFTHLPEAGGPEVT |
| | 78) with 1 additional aa at N- | YEPPPTAPT |
| | terminus | |
| 1373 | N20Q mutant of Hybrid hu- | EAETRECIYYNANWELERTQQSGLERCYGDKDKRRHCYASWRNSSGSIEIV |
| | ActRIIB-ECD (SEQ ID NO: | KQGCWLDDFNCYDRTDCVATEENPQVYFCCCEGNFCNERFTHLPEAGGPEV |
| | 78) with 2 additional aa at N- | TYEPPPTAPT |
| | terminus | |
| 1374 | N21Q mutant of Hybrid hu- | GEAETRECIYYNANWELERTQQSGLERCYGDKDKRRHCYASWRNSSGSIEI |
| | ActRIIB-ECD (SEQ ID NO: | VKQGCWLDDFNCYDRTDCVATEENPQVYFCCCEGNFCNERFTHLPEAGGPE |
| | 78) with 3 additional aa at N- | VTYEPPPTAPT |
| | terminus | |
| 1375 | N22Q mutant of Hybrid hu- | RGEAETRECIYYNANWELERTQQSGLERCYGDKDKRRHCYASWRNSSGSIEI |
| | ActRIIB-ECD (SEQ ID NO: | VKQGCWLDDFNCYDRTDCVATEENPQVYFCCCEGNFCNERFTHLPEAGGPE |
| | 78) with 4 additional aa at N- | VTYEPPPTAPT |
| | terminus | |
| 1376 | N23Q mutant of Hybrid hu- | GRGEAETRECIYYNANWELERTQQSGLERCYGDKDKRRHCYASWRNSSGSI |
| | ActRIIB-ECD (SEQ ID NO: | EIVKQGCWLDDFNCYDRTDCVATEENPQVYFCCCEGNFCNERFTHLPEAGG |
| | 78) with 5 additional aa at N- | PEVTYEPPPTAPT |
| | terminus | |
| 1377 | N24Q mutant of Hybrid hu- | SGRGEAETRECIYYNANWELERTQQSGLERCYGDKDKRRHCYASWRNSSGS |
| | ActRIIB-ECD (SEQ ID NO: | IEIVKQGCWLDDFNCYDRTDCVATEENPQVYFCCCEGNFCNERFTHLPEAG |
| | 78) with 6 additional aa at N- | GPEVTYEPPPTAPT |
| | terminus | |
| 1378 | N19Q mutant of Hybrid hu- | AETRECIYYNANWELERTQQSGLERCEGEQDKRLHCYASWRNSSGTIELVK |
| | ActRIIB-ECD (SEQ ID NO: | KGCWLDDFNCYDRTDCVATEENPQVYFCCCEGNFCNERFTHLPEAGGPEVT |
| | 79) with 1 additional aa at N- | YEPPPTAPT |
| | terminus | |
| 1379 | N20Q mutant of Hybrid hu- | EAETRECIYYNANWELERTQQSGLERCEGEQDKRLHCYASWRNSSGTIELV |
| | ActRIIB-ECD (SEQ ID NO: | KKGCWLDDFNCYDRTDCVATEENPQVYFCCCEGNFCNERFTHLPEAGGPEV |
| | 79) with 2 additional aa at N- | TYEPPPTAPT |
| | terminus | |
| 1380 | N21Q mutant of Hybrid hu- | GEAETRECIYYNANWELERTQQSGLERCEGEQDKRLHCYASWRNSSGTIEL |
| | ActRIIB-ECD (SEQ ID NO: | VKKGCWLDDFNCYDRTDCVATEENPQVYFCCCEGNFCNERFTHLPEAGGPE |
| | 79) with 3 additional aa at N- | VTYEPPPTAPT |
| | terminus | |
| 1381 | N22Q mutant of Hybrid hu- | RGEAETRECIYYNANWELERTQQSGLERCEGEQDKRLHCYASWRNSSGTIE |
| | ActRIIB-ECD (SEQ ID NO: | LVKKGCWLDDFNCYDRTDCVATEENPQVYFCCCEGNFCNERFTHLPEAGGP |
| | 79) with 4 additional aa at N- | EVTYEPPPTAPT |
| | terminus | |
| 1382 | N23Q mutant of Hybrid hu- | GRGEAETRECIYYNANWELERTQQSGLERCEGEQDKRLHCYASWRNSSGTI |
| | ActRIIB-ECD (SEQ ID NO: | ELVKKGCWLDDFNCYDRTDCVATEENPQVYFCCCEGNFCNERFTHLPEAGG |
| | 79) with 5 additional aa at N- | PEVTYEPPPTAPT |
| | terminus | |
| 1383 | N24Q mutant of Hybrid hu- | SGRGEAETRECIYYNANWELERTQQSGLERCEGEQDKRLHCYASWRNSSGT |
| | ActRIIB-ECD (SEQ ID NO: | IELVKKGCWLDDFNCYDRTDCVATEENPQVYFCCCEGNFCNERFTHLPEAG |
| | 79) with 6 additional aa at N- | GPEVTYEPPPTAPT |
| | terminus | |
| 1384 | N19Q mutant of Hybrid hu- | AETRECIYYNANWELERTQQSGLERCEGEQDKRLHCYASWRNSSGTIELVK |
| | ActRIIB-ECD (SEQ ID NO: | KGCWLDDFNCYDRQECVATEENPQVYFCCCEGNFCNEKFSYFPEMEVTQPT |
| | 80) with 1 additional aa at N- | SNPVTPKPP |
| | terminus | |
| 1385 | N20Q mutant of Hybrid hu- | EAETRECIYYNANWELERTQQSGLERCEGEQDKRLHCYASWRNSSGTIELV |
| | ActRIIB-ECD (SEQ ID NO: | KKGCWLDDFNCYDRQECVATEENPQVYFCCCEGNFCNEKFSYFPEMEVTQP |
| | 80) with 2 additional aa at N- | TSNPVTPKPP |
| | terminus | |
| 1386 | N21Q mutant of Hybrid hu- | GEAETRECIYYNANWELERTQQSGLERCEGEQDKRLHCYASWRNSSGTIEL |
| | ActRIIB-ECD (SEQ ID NO: | VKKGCWLDDFNCYDRQECVATEENPQVYFCCCEGNFCNEKFSYFPEMEVT |
| | 80) with 3 additional aa at N- | QPTSNPVTPKPP |
| | terminus | |
| 1387 | N22Q mutant of Hybrid hu- | RGEAETRECIYYNANWELERTQQSGLERCEGEQDKRLHCYASWRNSSGTIE |
| | ActRIIB-ECD (SEQ ID NO: | LVKKGCWLDDFNCYDRQECVATEENPQVYFCCCEGNFCNEKFSYFPEMEVT |
| | 80) with 4 additional aa at N- | QPTSNPVTPKPP |
| | terminus | |
| 1388 | N23Q mutant of Hybrid hu- | GRGEAETRECIYYNANWELERTQQSGLERCEGEQDKRLHCYASWRNSSGTI |
| | ActRIIB-ECD (SEQ ID NO: | ELVKKGCWLDDFNCYDRQECVATEENPQVYFCCCEGNFCNEKFSYFPEMEV |
| | 80) with 5 additional aa at N- | TQPTSNPVTPKPP |
| | terminus | |
| 1389 | N24Q mutant of Hybrid hu- | SGRGEAETRECIYYNANWELERTQQSGLERCEGEQDKRLHCYASWRNSSGT |
| | ActRIIB-ECD (SEQ ID NO: | IELVKKGCWLDDFNCYDRQECVATEENPQVYFCCCEGNFCNEKFSYFPEME |
| | 80) with 6 additional aa at N- | VTQPTSNPVTPKPP |
| | terminus | |
| 1390 | N19Q mutant of Hybrid hu- | AETRECIYYNANWELERTQQSGLERCEGEQDKRLHCYASWRNSSGTIELVK |
| | ActRIIB-ECD (SEQ ID NO: | KGCWLDDFNCYDRQECVATEENPQVYFCCCEGNFCNEKFSYFPQMEVTQPT |
| | 81) with 1 additional aa at N- | SNPVTPKPP |
| | terminus | |
| 1391 | N20Q mutant of Hybrid hu- | EAETRECIYYNANWELERTQQSGLERCEGEQDKRLHCYASWRNSSGTIELV |
| | ActRIIB-ECD (SEQ ID NO: | KKGCWLDDFNCYDRQECVATEENPQVYFCCCEGNFCNEKFSYFPQMEVTQ |
| | 81) with 2 additional aa at N- | PTSNPVTPKPP |
| | terminus | |
| 1392 | N21Q mutant of Hybrid hu- | GEAETRECIYYNANWELERTQQSGLERCEGEQDKRLHCYASWRNSSGTIEL |
| | ActRIIB-ECD (SEQ ID NO: | VKKGCWLDDFNCYDRQECVATEENPQVYFCCCEGNFCNEKFSYFPQMEVT |
| | 81) with 3 additional aa at N- | QPTSNPVTPKPP |
| | terminus | |
| 1393 | N22Q mutant of Hybrid hu- | RGEAETRECIYYNANWELERTQQSGLERCEGEQDKRLHCYASWRNSSGTIE |
| | ActRIIB-ECD (SEQ ID NO: | LVKKGCWLDDFNCYDRQECVATEENPQVYFCCCEGNFCNEKFSYFPQMEV |
| | 81) with 4 additional aa at N- | TQPTSNPVTPKPP |
| | terminus | |
| 1394 | N23Q mutant of Hybrid hu- | GRGEAETRECIYYNANWELERTQQSGLERCEGEQDKRLHCYASWRNSSGTI |
| | ActRIIB-ECD (SEQ ID NO: | ELVKKGCWLDDFNCYDRQECVATEENPQVYFCCCEGNFCNEKFSYFPQME |
| | 81) with 5 additional aa at N- | VTQPTSNPVTPKPP |
| | terminus | |
| 1395 | N24Q mutant of Hybrid hu- | SGRGEAETRECIYYNANWELERTQQSGLERCEGEQDKRLHCYASWRNSSGT |
| | ActRIIB-ECD (SEQ ID NO: | IELVKKGCWLDDFNCYDRQECVATEENPQVYFCCCEGNFCNEKFSYFPQME |
| | 81) with 6 additional aa at N- | VTQPTSNPVTPKPP |
| | terminus | |
| 1396 | N19Q mutant of Hybrid hu- | AETRECIYYNANWELERTQQSGLERCYGDKDKRRHCYASWRNSSGTIELVK |
| | ActRIIB-ECD (SEQ ID NO: | KGCWLDDINCYDRTDCVEKKDSPEVYFCCCEGNFCNEKFSYFPEMEVTQPT |
| | 82) with 1 additional aa at N- | SNPVTPKPP |
| | terminus | |
| 1397 | N20Q mutant of Hybrid hu- | EAETRECIYYNANWELERTQQSGLERCYGDKDKRRHCYASWRNSSGTIELV |
| | ActRIIB-ECD (SEQ ID NO: | KKGCWLDDINCYDRTDCVEKKDSPEVYFCCCEGNFCNEKFSYFPEMEVTQP |
| | 82) with 2 additional aa at N- | TSNPVTPKPP |
| | terminus | |
| 1398 | N21Q mutant of Hybrid hu- | GEAETRECIYYNANWELERTQQSGLERCYGDKDKRRHCYASWRNSSGTIEL |
| | ActRIIB-ECD (SEQ ID NO: | VKKGCWLDDINCYDRTDCVEKKDSPEVYFCCCEGNFCNEKFSYFPEMEVTQ |
| | 82) with 3 additional aa at N- | PTSNPVTPKPP |
| | terminus | |
| 1399 | N22Q mutant of Hybrid hu- | RGEAETRECIYYNANWELERTQQSGLERCYGDKDKRRHCYASWRNSSGTIE |
| | ActRIIB-ECD (SEQ ID NO: | LVKKGCWLDDINCYDRTDCVEKKDSPEVYFCCCEGNFCNEKFSYFPEMEVT |
| | 82) with 4 additional aa at N- | QPTSNPVTPKPP |
| | terminus | |
| 1400 | N23Q mutant of Hybrid hu- | GRGEAETRECIYYNANWELERTQQSGLERCYGDKDKRRHCYASWRNSSGTI |
| | ActRIIB-ECD (SEQ ID NO: | ELVKKGCWLDDINCYDRTDCVEKKDSPEVYFCCCEGNFCNEKFSYFPEMEV |
| | 82) with 5 additional aa at N- | TQPTSNPVTPKPP |
| | terminus | |
| 1401 | N24Q mutant of Hybrid hu- | SGRGEAETRECIYYNANWELERTQQSGLERCYGDKDKRRHCYASWRNSSG |
| | ActRIIB-ECD (SEQ ID NO: | TIELVKKGCWLDDINCYDRTDCVEKKDSPEVYFCCCEGNFCNEKFSYFPEME |
| | 82) with 6 additional aa at N- | VTQPTSNPVTPKPP |
| | terminus | |
| 1402 | N19Q mutant of Hybrid hu- | AETRECIYYNANWELERTQQSGLERCYGDKDKRRHCYASWRNSSGTIELVK |
| | ActRIIB-ECD (SEQ ID NO: | KGCWLDDINCYDRTDCVEKKDSPEVYFCCCEGNFCNEKFSYFPQMEVTQPT |
| | 83) with 1 additional aa at N- | SNPVTPKPP |
| | terminus | |
| 1403 | N20Q mutant of Hybrid hu- | EAETRECIYYNANWELERTQQSGLERCYGDKDKRRHCYASWRNSSGTIELV |
| | ActRIIB-ECD (SEQ ID NO: | KKGCWLDDINCYDRTDCVEKKDSPEVYFCCCEGNFCNEKFSYFPQMEVTQP |
| | 83) with 2 additional aa at N- | TSNPVTPKPP |
| | terminus | |
| 1404 | N21Q mutant of Hybrid hu- | GEAETRECIYYNANWELERTQQSGLERCYGDKDKRRHCYASWRNSSGTIEL |
| | ActRIIB-ECD (SEQ ID NO: | VKKGCWLDDINCYDRTDCVEKKDSPEVYFCCCEGNFCNEKFSYFPQMEVTQ |
| | 83) with 3 additional aa at N- | PTSNPVTPKPP |
| | terminus | |
| 1405 | N22Q mutant of Hybrid hu- | RGEAETRECIYYNANWELERTQQSGLERCYGDKDKRRHCYASWRNSSGTIE |
| | ActRIIB-ECD (SEQ ID NO: | LVKKGCWLDDINCYDRTDCVEKKDSPEVYFCCCEGNFCNEKFSYFPQMEVT |
| | 83) with 4 additional aa at N- | QPTSNPVTPKPP |
| | terminus | |
| 1406 | N23Q mutant of Hybrid hu- | GRGEAETRECIYYNANWELERTQQSGLERCYGDKDKRRHCYASWRNSSGTI |
| | ActRIIB-ECD (SEQ ID NO: | ELVKKGCWLDDINCYDRTDCVEKKDSPEVYFCCCEGNFCNEKFSYFPQMEV |
| | 83) with 5 additional aa at N- | TQPTSNPVTPKPP |
| | terminus | |
| 1407 | N24Q mutant of Hybrid hu- | SGRGEAETRECIYYNANWELERTQQSGLERCYGDKDKRRHCYASWRNSSG |
| | ActRIIB-ECD (SEQ ID NO: | TIELVKKGCWLDDINCYDRTDCVEKKDSPEVYFCCCEGNFCNEKFSYFPQM |
| | 83) with 6 additional aa at N- | EVTQPTSNPVTPKPP |
| | terminus | |
| 1408 | N19Q mutant of Hybrid hu- | AETRECIYYNANWELERTQQSGLERCYGDKDKRRHCYASWRNSSGTIELVK |
| | ActRIIB-ECD (SEQ ID NO: | KGCWLDDFNCYDRQECVATEENPQVYFCCCEGNFCNEKFSYFPQMEVTQPT |
| | 84) with 1 additional aa at N- | SNPVTPKPP |
| | terminus | |
| 1409 | N20Q mutant of Hybrid hu- | EAETRECIYYNANWELERTQQSGLERCYGDKDKRRHCYASWRNSSGTIELV |
| | ActRIIB-ECD (SEQ ID NO: | KKGCWLDDFNCYDRQECVATEENPQVYFCCCEGNFCNEKFSYFPQMEVTQ |
| | 84) with 2 additional aa at N- | PTSNPVTPKPP |
| | terminus | |
| 1410 | N21Q mutant of Hybrid hu- | GEAETRECIYYNANWELERTQQSGLERCYGDKDKRRHCYASWRNSSGTIEL |
| | ActRIIB-ECD (SEQ ID NO: | VKKGCWLDDFNCYDRQECVATEENPQVYFCCCEGNFCNEKFSYFPQMEVT |
| | 84) with 3 additional aa at N- | QPTSNPVTPKPP |
| | terminus | |
| 1411 | N22Q mutant of Hybrid hu- | RGEAETRECIYYNANWELERTQQSGLERCYGDKDKRRHCYASWRNSSGTIE |
| | ActRIIB-ECD (SEQ ID NO: | LVKKGCWLDDFNCYDRQECVATEENPQVYFCCCEGNFCNEKFSYFPQMEV |
| | 84) with 4 additional aa at N- | TQPTSNPVTPKPP |
| | terminus | |
| 1412 | N23Q mutant of Hybrid hu- | GRGEAETRECIYYNANWELERTQQSGLERCYGDKDKRRHCYASWRNSSGTI |
| | ActRIIB-ECD (SEQ ID NO: | ELVKKGCWLDDFNCYDRQECVATEENPQVYFCCCEGNFCNEKFSYFPQME |
| | 84) with 5 additional aa at N- | VTQPTSNPVTPKPP |
| | terminus | |
| 1413 | N24Q mutant of Hybrid hu- | SGRGEAETRECIYYNANWELERTQQSGLERCYGDKDKRRHCYASWRNSSG |
| | ActRIIB-ECD (SEQ ID NO: | TIELVKKGCWLDDFNCYDRQECVATEENPQVYFCCCEGNFCNEKFSYFPQM |
| | 84) with 6 additional aa at N- | EVTQPTSNPVTPKPP |
| | terminus | |
| 1414 | N19Q mutant of Hybrid hu- | AETRECIYYNANWELERTQQSGLERCYGDKDKRRHCYASWRNSSGTIELVK |
| | ActRIIB-ECD (SEQ ID NO: | QGCWLDDFNCYDRQECVATEENPQVYFCCCEGNFCNEKFSYFPQMEVTQPT |
| | 85) with 1 additional aa at N- | SNPVTPKPP |
| | terminus | |
| 1415 | N20Q mutant of Hybrid hu- | EAETRECIYYNANWELERTQQSGLERCYGDKDKRRHCYASWRNSSGTIELV |
| | ActRIIB-ECD (SEQ ID NO: | KQGCWLDDFNCYDRQECVATEENPQVYFCCCEGNFCNEKFSYFPQMEVTQ |
| | 85) with 2 additional aa at N- | PTSNPVTPKPP |
| | terminus | |
| 1416 | N21Q mutant of Hybrid hu- | GEAETRECIYYNANWELERTQQSGLERCYGDKDKRRHCYASWRNSSGTIEL |
| | ActRIIB-ECD (SEQ ID NO: | VKQGCWLDDFNCYDRQECVATEENPQVYFCCCEGNFCNEKFSYFPQMEVT |
| | 85) with 3 additional aa at N- | QPTSNPVTPKPP |
| | terminus | |
| 1417 | N22Q mutant of Hybrid hu- | RGEAETRECIYYNANWELERTQQSGLERCYGDKDKRRHCYASWRNSSGTIE |
| | ActRIIB-ECD (SEQ ID NO: | LVKQGCWLDDFNCYDRQECVATEENPQVYFCCCEGNFCNEKFSYFPQMEV |
| | 85) with 4 additional aa at N- | TQPTSNPVTPKPP |
| | terminus | |
| 1418 | N23Q mutant of Hybrid hu- | GRGEAETRECIYYNANWELERTQQSGLERCYGDKDKRRHCYASWRNSSGTI |
| | ActRIIB-ECD (SEQ ID NO: | ELVKQGCWLDDFNCYDRQECVATEENPQVYFCCCEGNFCNEKFSYFPQME |
| | 85) with 5 additional aa at N- | VTQPTSNPVTPKPP |
| | terminus | |
| 1419 | N24Q mutant of Hybrid hu- | SGRGEAETRECIYYNANWELERTQQSGLERCYGDKDKRRHCYASWRNSSG |
| | ActRIIB-ECD (SEQ ID NO: | TIELVKQGCWLDDFNCYDRQECVATEENPQVYFCCCEGNFCNEKFSYFPQM |
| | 85) with 6 additional aa at N- | EVTQPTSNPVTPKPP |
| | terminus | |
| 1420 | N19Q mutant of Hybrid hu- | AETRECIYYNANWELERTQQSGLERCYGDKDKRRHCYASWRNSSGTIEIVK |
| | ActRIIB-ECD (SEQ ID NO: | KGCWLDDFNCYDRQECVATKENPQVYFCCCEGNFCNEKFSYFPQMEVTQP |
| | 86) with 1 additional aa at N- | TSNPVTPKPP |
| | terminus | |
| 1421 | N20Q mutant of Hybrid hu- | EAETRECIYYNANWELERTQQSGLERCYGDKDKRRHCYASWRNSSGTIEIV |
| | ActRIIB-ECD (SEQ ID NO: | KKGCWLDDFNCYDRQECVATKENPQVYFCCCEGNFCNEKFSYFPQMEVTQ |
| | 86) with 2 additional aa at N- | PTSNPVTPKPP |
| | terminus | |
| 1422 | N21Q mutant of Hybrid hu- | GEAETRECIYYNANWELERTQQSGLERCYGDKDKRRHCYASWRNSSGTIEI |
| | ActRIIB-ECD (SEQ ID NO: | VKKGCWLDDFNCYDRQECVATKENPQVYFCCCEGNFCNEKFSYFPQMEVT |
| | 86) with 3 additional aa at N- | QPTSNPVTPKPP |
| | terminus | |
| 1423 | N22Q mutant of Hybrid hu- | RGEAETRECIYYNANWELERTQQSGLERCYGDKDKRRHCYASWRNSSGTIE |
| | ActRIIB-ECD (SEQ ID NO: | IVKKGCWLDDFNCYDRQECVATKENPQVYFCCCEGNFCNEKFSYFPQMEVT |
| | 86) with 4 additional aa at N- | QPTSNPVTPKPP |
| | terminus | |
| 1424 | N23Q mutant of Hybrid hu- | GRGEAETRECIYYNANWELERTQQSGLERCYGDKDKRRHCYASWRNSSGTI |
| | ActRIIB-ECD (SEQ ID NO: | EIVKKGCWLDDFNCYDRQECVATKENPQVYFCCCEGNFCNEKFSYFPQMEV |
| | 86) with 5 additional aa at N- | TQPTSNPVTPKPP |
| | terminus | |
| 1425 | N24Q mutant of Hybrid hu- | SGRGEAETRECIYYNANWELERTQQSGLERCYGDKDKRRHCYASWRNSSG |
| | ActRIIB-ECD (SEQ ID NO: | TIEIVKKGCWLDDFNCYDRQECVATKENPQVYFCCCEGNFCNEKFSYFPQM |
| | 86) with 6 additional aa at N- | EVTQPTSNPVTPKPP |
| | terminus | |
| 1426 | N19Q mutant of Hybrid hu- | AETRECIYYNANWELERTQQSGLERCYGDKDKRRHCYASWRNSSGSIELVK |
| | ActRIIB-ECD (SEQ ID NO: | KGCWLDDFNCYDRQECVATKENPQVYFCCCEGNFCNEKFSYFPQMEVTQP |
| | 87) with 1 additional aa at N- | TSNPVTPKPP |
| | terminus | |
| 1427 | N20Q mutant of Hybrid hu- | EAETRECIYYNANWELERTQQSGLERCYGDKDKRRHCYASWRNSSGSIELV |
| | ActRIIB-ECD (SEQ ID NO: | KKGCWLDDFNCYDRQECVATKENPQVYFCCCEGNFCNEKFSYFPQMEVTQ |
| | 87) with 2 additional aa at N- | PTSNPVTPKPP |
| | terminus | |
| 1428 | N21Q mutant of Hybrid hu- | GEAETRECIYYNANWELERTQQSGLERCYGDKDKRRHCYASWRNSSGSIEL |
| | ActRIIB-ECD (SEQ ID NO: | VKKGCWLDDFNCYDRQECVATKENPQVYFCCCEGNFCNEKFSYFPQMEVT |
| | 87) with 3 additional aa at N- | QPTSNPVTPKPP |
| | terminus | |
| 1429 | N22Q mutant of Hybrid hu- | RGEAETRECIYYNANWELERTQQSGLERCYGDKDKRRHCYASWRNSSGSIE |
| | ActRIIB-ECD (SEQ ID NO: | LVKKGCWLDDFNCYDRQECVATKENPQVYFCCCEGNFCNEKFSYFPQMEV |
| | 87) with 4 additional aa at N- | TQPTSNPVTPKPP |
| | terminus | |
| 1430 | N23Q mutant of Hybrid hu- | GRGEAETRECIYYNANWELERTQQSGLERCYGDKDKRRHCYASWRNSSGSI |
| | ActRIIB-ECD (SEQ ID NO: | ELVKKGCWLDDFNCYDRQECVATKENPQVYFCCCEGNFCNEKFSYFPQME |
| | 87) with 5 additional aa at N- | VTQPTSNPVTPKPP |
| | terminus | |
| 1431 | N24Q mutant of Hybrid hu- | SGRGEAETRECIYYNANWELERTQQSGLERCYGDKDKRRHCYASWRNSSGS |
| | ActRIIB-ECD (SEQ ID NO: | IELVKKGCWLDDFNCYDRQECVATKENPQVYFCCCEGNFCNEKFSYFPQME |
| | 87) with 6 additional aa at N- | VTQPTSNPVTPKPP |
| | terminus | |
| 1432 | N19Q mutant of Hybrid hu- | AETRECIYYNANWELERTQQSGLERCEGEQDKRLHCYASWRNSSGSIELVK |
| | ActRIIB-ECD (SEQ ID NO: | KGCWLDDFNCYDRQECVATEENPQVYFCCCEGNFCNEKFSYFPQMEVTQPT |
| | 88) with 1 additional aa at N- | SNPVTPKPP |
| | terminus | |
| 1433 | N20Q mutant of Hybrid hu- | EAETRECIYYNANWELERTQQSGLERCEGEQDKRLHCYASWRNSSGSIELV |
| | ActRIIB-ECD (SEQ ID NO: | KKGCWLDDFNCYDRQECVATEENPQVYFCCCEGNFCNEKFSYFPQMEVTQ |
| | 88) with 2 additional aa at N- | PTSNPVTPKPP |
| | terminus | |
| 1434 | N21Q mutant of Hybrid hu- | GEAETRECIYYNANWELERTQQSGLERCEGEQDKRLHCYASWRNSSGSIEL |
| | ActRIIB-ECD (SEQ ID NO: | VKKGCWLDDFNCYDRQECVATEENPQVYFCCCEGNFCNEKFSYFPQMEVT |
| | 88) with 3 additional aa at N- | QPTSNPVTPKPP |
| | terminus | |
| 1435 | N22Q mutant of Hybrid hu- | RGEAETRECIYYNANWELERTQQSGLERCEGEQDKRLHCYASWRNSSGSIEL |
| | ActRIIB-ECD (SEQ ID NO: | VKKGCWLDDFNCYDRQECVATEENPQVYFCCCEGNFCNEKFSYFPQMEVT |
| | 88) with 4 additional aa at N- | QPTSNPVTPKPP |
| | terminus | |
| 1436 | N23Q mutant of Hybrid hu- | GRGEAETRECIYYNANWELERTQQSGLERCEGEQDKRLHCYASWRNSSGSI |
| | ActRIIB-ECD (SEQ ID NO: | ELVKKGCWLDDFNCYDRQECVATEENPQVYFCCCEGNFCNEKFSYFPQME |
| | 88) with 5 additional aa at N- | VTQPTSNPVTPKPP |
| | terminus | |
| 1437 | N24Q mutant of Hybrid hu- | SGRGEAETRECIYYNANWELERTQQSGLERCEGEQDKRLHCYASWRNSSGS |
| | ActRIIB-ECD (SEQ ID NO: | IELVKKGCWLDDFNCYDRQECVATEENPQVYFCCCEGNFCNEKFSYFPQME |
| | 88) with 6 additional aa at N- | VTQPTSNPVTPKPP |
| | terminus | |
| 1438 | N19Q mutant of Hybrid hu- | AETRECIYYNANWELERTQQSGLERCEGEQDKRLHCYASWRNSSGTIEIVKK |
| | ActRIIB-ECD (SEQ ID NO: | GCWLDDFNCYDRQECVATEENPQVYFCCCEGNFCNEKFSYFPQMEVTQPTS |
| | 89) with 1 additional aa at N- | NPVTPKPP |
| | terminus | |
| 1439 | N20Q mutant of Hybrid hu- | EAETRECIYYNANWELERTQQSGLERCEGEQDKRLHCYASWRNSSGTIEIVK |
| | ActRIIB-ECD (SEQ ID NO: | KGCWLDDFNCYDRQECVATEENPQVYFCCCEGNFCNEKFSYFPQMEVTQPT |
| | 89) with 2 additional aa at N- | SNPVTPKPP |
| | terminus | |
| 1440 | N21Q mutant of Hybrid hu- | GEAETRECIYYNANWELERTQQSGLERCEGEQDKRLHCYASWRNSSGTIEIV |
| | ActRIIB-ECD (SEQ ID NO: | KKGCWLDDFNCYDRQECVATEENPQVYFCCCEGNFCNEKFSYFPQMEVTQ |
| | 89) with 3 additional aa at N- | PTSNPVTPKPP |
| | terminus | |
| 1441 | N22Q mutant of Hybrid hu- | RGEAETRECIYYNANWELERTQQSGLERCEGEQDKRLHCYASWRNSSGTIEI |
| | ActRIIB-ECD (SEQ ID NO: | VKKGCWLDDFNCYDRQECVATEENPQVYFCCCEGNFCNEKFSYFPQMEVT |
| | 89) with 4 additional aa at N- | QPTSNPVTPKPP |
| | terminus | |
| 1442 | N23Q mutant of Hybrid hu- | GRGEAETRECIYYNANWELERTQQSGLERCEGEQDKRLHCYASWRNSSGTI |
| | ActRIIB-ECD (SEQ ID NO: | EIVKKGCWLDDFNCYDRQECVATEENPQVYFCCCEGNFCNEKFSYFPQMEV |
| | 89) with 5 additional aa at N- | TQPTSNPVTPKPP |
| | terminus | |
| 1443 | N24Q mutant of Hybrid hu- | SGRGEAETRECIYYNANWELERTQQSGLERCEGEQDKRLHCYASWRNSSGT |
| | ActRIIB-ECD (SEQ ID NO: | IEIVKKGCWLDDFNCYDRQECVATEENPQVYFCCCEGNFCNEKFSYFPQME |
| | 89) with 6 additional aa at N- | VTQPTSNPVTPKPP |
| | terminus | |
| 1444 | N19Q mutant of Hybrid hu- | AETRECIYYNANWELERTQQSGLERCEGEQDKRLHCYASWRNSSGTIELVK |
| | ActRIIB-ECD (SEQ ID NO: | QGCWLDDFNCYDRQECVATEENPQVYFCCCEGNFCNEKFSYFPQMEVTQPT |
| | 90) with 1 additional aa at N- | SNPVTPKPP |
| | terminus | |
| 1445 | N20Q mutant of Hybrid hu- | EAETRECIYYNANWELERTQQSGLERCEGEQDKRLHCYASWRNSSGTIELV |
| | ActRIIB-ECD (SEQ ID NO: | KQGCWLDDFNCYDRQECVATEENPQVYFCCCEGNFCNEKFSYFPQMEVTQ |
| | 90) with 2 additional aa at N- | PTSNPVTPKPP |
| | terminus | |
| 1446 | N21Q mutant of Hybrid hu- | GEAETRECIYYNANWELERTQQSGLERCEGEQDKRLHCYASWRNSSGTIEL |
| | ActRIIB-ECD (SEQ ID NO: | VKQGCWLDDFNCYDRQECVATEENPQVYFCCCEGNFCNEKFSYFPQMEVT |
| | 90) with 3 additional aa at N- | QPTSNPVTPKPP |
| | terminus | |
| 1447 | N22Q mutant of Hybrid hu- | RGEAETRECIYYNANWELERTQQSGLERCEGEQDKRLHCYASWRNSSGTIE |
| | ActRIIB-ECD (SEQ ID NO: | LVKQGCWLDDFNCYDRQECVATEENPQVYFCCCEGNFCNEKFSYFPQMEV |
| | 90) with 4 additional aa at N- | TQPTSNPVTPKPP |
| | terminus | |
| 1448 | N23Q mutant of Hybrid hu- | GRGEAETRECIYYNANWELERTQQSGLERCEGEQDKRLHCYASWRNSSGTI |
| | ActRIIB-ECD (SEQ ID NO: | ELVKQGCWLDDFNCYDRQECVATEENPQVYFCCCEGNFCNEKFSYFPQME |
| | 90) with 5 additional aa at N- | VTQPTSNPVTPKPP |
| | terminus | |
| 1449 | N24Q mutant of Hybrid hu- | SGRGEAETRECIYYNANWELERTQQSGLERCEGEQDKRLHCYASWRNSSGT |
| | ActRIIB-ECD (SEQ ID NO: | IELVKQGCWLDDFNCYDRQECVATEENPQVYFCCCEGNFCNEKFSYFPQME |
| | 90) with 6 additional aa at N- | VTQPTSNPVTPKPP |
| | terminus | |
| 1450 | N19Q mutant of Hybrid hu- | AETRECIYYNANWELERTQQSGLERCEGEQDKRLHCYASWRNSSGTIELVK |
| | ActRIIB-ECD (SEQ ID NO: | KGCWLDDFNCYDRQECVETEENPQVYFCCCEGNFCNEKFSYFPQMEVTQPT |
| | 91) with 1 additional aa at N- | SNPVTPKPP |
| | terminus | |
| 1451 | N20Q mutant of Hybrid hu- | EAETRECIYYNANWELERTQQSGLERCEGEQDKRLHCYASWRNSSGTIELV |
| | ActRIIB-ECD (SEQ ID NO: | KKGCWLDDFNCYDRQECVETEENPQVYFCCCEGNFCNEKFSYFPQMEVTQP |
| | 91) with 2 additional aa at N- | TSNPVTPKPP |
| | terminus | |
| 1452 | N21Q mutant of Hybrid hu- | GEAETRECIYYNANWELERTQQSGLERCEGEQDKRLHCYASWRNSSGTIEL |
| | ActRIIB-ECD (SEQ ID NO: | VKKGCWLDDFNCYDRQECVETEENPQVYFCCCEGNFCNEKFSYFPQMEVT |
| | 91) with 3 additional aa at N- | QPTSNPVTPKPP |
| | terminus | |
| 1453 | N22Q mutant of Hybrid hu- | RGEAETRECIYYNANWELERTQQSGLERCEGEQDKRLHCYASWRNSSGTIE |
| | ActRIIB-ECD (SEQ ID NO: | LVKKGCWLDDFNCYDRQECVETEENPQVYFCCCEGNFCNEKFSYFPQMEVT |
| | 91) with 4 additional aa at N- | QPTSNPVTPKPP |
| | terminus | |
| 1454 | N23Q mutant of Hybrid hu- | GRGEAETRECIYYNANWELERTQQSGLERCEGEQDKRLHCYASWRNSSGTI |
| | ActRIIB-ECD (SEQ ID NO: | ELVKKGCWLDDFNCYDRQECVETEENPQVYFCCCEGNFCNEKFSYFPQMEV |
| | 91) with 5 additional aa at N- | TQPTSNPVTPKPP |
| | terminus | |
| 1455 | N24Q mutant of Hybrid hu- | SGRGEAETRECIYYNANWELERTQQSGLERCEGEQDKRLHCYASWRNSSGT |
| | ActRIIB-ECD (SEQ ID NO: | IELVKKGCWLDDFNCYDRQECVETEENPQVYFCCCEGNFCNEKFSYFPQME |
| | 91) with 6 additional aa at N- | VTQPTSNPVTPKPP |
| | terminus | |
| 1456 | N19Q mutant of Hybrid hu- | AETRECIYYNANWELERTQQSGLERCEGEQDKRLHCYASWRNSSGTIELVK |
| | ActRIIB-ECD (SEQ ID NO: | KGCWLDDFNCYDRQECVAKEENPQVYFCCCEGNFCNEKFSYFPQMEVTQP |
| | 92) with 1 additional aa at N- | TSNPVTPKPP |
| | terminus | |
| 1457 | N20Q mutant of Hybrid hu- | EAETRECIYYNANWELERTQQSGLERCEGEQDKRLHCYASWRNSSGTIELV |
| | ActRIIB-ECD (SEQ ID NO: | KKGCWLDDFNCYDRQECVAKEENPQVYFCCCEGNFCNEKFSYFPQMEVTQ |
| | 92) with 2 additional aa at N- | PTSNPVTPKPP |
| | terminus | |
| 1458 | N21Q mutant of Hybrid hu- | GEAETRECIYYNANWELERTQQSGLERCEGEQDKRLHCYASWRNSSGTIEL |
| | ActRIIB-ECD (SEQ ID NO: | VKKGCWLDDFNCYDRQECVAKEENPQVYFCCCEGNFCNEKFSYFPQMEVT |
| | 92) with 3 additional aa at N- | QPTSNPVTPKPP |
| | terminus | |
| 1459 | N22Q mutant of Hybrid hu- | RGEAETRECIYYNANWELERTQQSGLERCEGEQDKRLHCYASWRNSSGTIE |
| | ActRIIB-ECD (SEQ ID NO: | LVKKGCWLDDFNCYDRQECVAKEENPQVYFCCCEGNFCNEKFSYFPQMEV |
| | 92) with 4 additional aa at N- | TQPTSNPVTPKPP |
| | terminus | |
| 1460 | N23Q mutant of Hybrid hu- | GRGEAETRECIYYNANWELERTQQSGLERCEGEQDKRLHCYASWRNSSGTI |
| | ActRIIB-ECD (SEQ ID NO: | ELVKKGCWLDDFNCYDRQECVAKEENPQVYFCCCEGNFCNEKFSYFPQME |
| | 92) with 5 additional aa at N- | VTQPTSNPVTPKPP |
| | terminus | |
| 1461 | N24Q mutant of Hybrid hu- | SGRGEAETRECIYYNANWELERTQQSGLERCEGEQDKRLHCYASWRNSSGT |
| | ActRIIB-ECD (SEQ ID NO: | IELVKKGCWLDDFNCYDRQECVAKEENPQVYFCCCEGNFCNEKFSYFPQME |
| | 92) with 6 additional aa at N- | VTQPTSNPVTPKPP |
| | terminus | |
| 1462 | N19Q mutant of Hybrid hu- | AETRECIYYNANWELERTQQSGLERCEGEQDKRLHCYASWRNSSGTIELVK |
| | ActRIIB-ECD (SEQ ID NO: | KGCWLDDFNCYDRQECVATKENPQVYFCCCEGNFCNEKFSYFPQMEVTQP |
| | 93) with 1 additional aa at N- | TSNPVTPKPP |
| | terminus | |
| 1463 | N20Q mutant of Hybrid hu- | EAETRECIYYNANWELERTQQSGLERCEGEQDKRLHCYASWRNSSGTIELV |
| | ActRIIB-ECD (SEQ ID NO: | KKGCWLDDFNCYDRQECVATKENPQVYFCCCEGNFCNEKFSYFPQMEVTQ |
| | 93) with 2 additional aa at N- | PTSNPVTPKPP |
| | terminus | |
| 1464 | N21Q mutant of Hybrid hu- | GEAETRECIYYNANWELERTQQSGLERCEGEQDKRLHCYASWRNSSGTIEL |
| | ActRIIB-ECD (SEQ ID NO: | VKKGCWLDDFNCYDRQECVATKENPQVYFCCCEGNFCNEKFSYFPQMEVT |
| | 93) with 3 additional aa at N- | QPTSNPVTPKPP |
| | terminus | |
| 1465 | N22Q mutant of Hybrid hu- | RGEAETRECIYYNANWELERTQQSGLERCEGEQDKRLHCYASWRNSSGTIE |
| | ActRIIB-ECD (SEQ ID NO: | LVKKGCWLDDFNCYDRQECVATKENPQVYFCCCEGNFCNEKFSYFPQMEV |
| | 93) with 4 additional aa at N- | TQPTSNPVTPKPP |
| | terminus | |
| 1466 | N23Q mutant of Hybrid hu- | GRGEAETRECIYYNANWELERTQQSGLERCEGEQDKRLHCYASWRNSSGTI |
| | ActRIIB-ECD (SEQ ID NO: | ELVKKGCWLDDFNCYDRQECVATKENPQVYFCCCEGNFCNEKFSYFPQME |
| | 93) with 5 additional aa at N- | VTQPTSNPVTPKPP |
| | terminus | |
| 1467 | N24Q mutant of Hybrid hu- | SGRGEAETRECIYYNANWELERTQQSGLERCEGEQDKRLHCYASWRNSSGT |
| | ActRIIB-ECD (SEQ ID NO: | IELVKKGCWLDDFNCYDRQECVATKENPQVYFCCCEGNFCNEKFSYFPQME |
| | 93) with 6 additional aa at N- | VTQPTSNPVTPKPP |
| | terminus | |
| 1468 | N19Q mutant of Hybrid hu- | AETRECIYYNANWELERTQQSGLERCEGEQDKRLHCYASWRNSSGTIELVK |
| | ActRIIB-ECD (SEQ ID NO: | KGCWLDDFNCYDRQECVATEDNPQVYFCCCEGNFCNEKFSYFPQMEVTQP |
| | 94) with 1 additional aa at N- | TSNPVTPKPP |
| | terminus | |
| 1469 | N20Q mutant of Hybrid hu- | EAETRECIYYNANWELERTQQSGLERCEGEQDKRLHCYASWRNSSGTIELV |
| | ActRIIB-ECD (SEQ ID NO: | KKGCWLDDFNCYDRQECVATEDNPQVYFCCCEGNFCNEKFSYFPQMEVTQ |
| | 94) with 2 additional aa at N- | PTSNPVTPKPP |
| | terminus | |
| 1470 | N21Q mutant of Hybrid hu- | GEAETRECIYYNANWELERTQQSGLERCEGEQDKRLHCYASWRNSSGTIEL |
| | ActRIIB-ECD (SEQ ID NO: | VKKGCWLDDFNCYDRQECVATEDNPQVYFCCCEGNFCNEKFSYFPQMEVT |
| | 94) with 3 additional aa at N- | QPTSNPVTPKPP |
| | terminus | |
| 1471 | N22Q mutant of Hybrid hu- | RGEAETRECIYYNANWELERTQQSGLERCEGEQDKRLHCYASWRNSSGTIE |
| | ActRIIB-ECD (SEQ ID NO: | LVKKGCWLDDFNCYDRQECVATEDNPQVYFCCCEGNFCNEKFSYFPQMEV |
| | 94) with 4 additional aa at N- | TQPTSNPVTPKPP |
| | terminus | |
| 1472 | N23Q mutant of Hybrid hu- | GRGEAETRECIYYNANWELERTQQSGLERCEGEQDKRLHCYASWRNSSGTI |
| | ActRIIB-ECD (SEQ ID NO: | ELVKKGCWLDDFNCYDRQECVATEDNPQVYFCCCEGNFCNEKFSYFPQME |
| | 94) with 5 additional aa at N- | VTQPTSNPVTPKPP |
| | terminus | |
| 1473 | N24Q mutant of Hybrid hu- | SGRGEAETRECIYYNANWELERTQQSGLERCEGEQDKRLHCYASWRNSSGT |
| | ActRIIB-ECD (SEQ ID NO: | IELVKKGCWLDDFNCYDRQECVATEDNPQVYFCCCEGNFCNEKFSYFPQME |
| | 94) with 6 additional aa at N- | VTQPTSNPVTPKPP |
| | terminus | |
| 1474 | N19Q mutant of Hybrid hu- | AETRECIYYNANWELERTQQSGLERCEGEQDKRLHCYASWRNSSGTIELVK |
| | ActRIIB-ECD (SEQ ID NO: | KGCWLDDFNCYDRQECVATEESPQVYFCCCEGNFCNEKFSYFPQMEVTQPT |
| | 95) with 1 additional aa at N- | SNPVTPKPP |
| | terminus | |
| 1475 | N20Q mutant of Hybrid hu- | EAETRECIYYNANWELERTQQSGLERCEGEQDKRLHCYASWRNSSGTIELV |
| | ActRIIB-ECD (SEQ ID NO: | KKGCWLDDFNCYDRQECVATEESPQVYFCCCEGNFCNEKFSYFPQMEVTQP |
| | 95) with 2 additional aa at N- | TSNPVTPKPP |
| | terminus | |
| 1476 | N21Q mutant of Hybrid hu- | GEAETRECIYYNANWELERTQQSGLERCEGEQDKRLHCYASWRNSSGTIEL |
| | ActRIIB-ECD (SEQ ID NO: | VKKGCWLDDFNCYDRQECVATEESPQVYFCCCEGNFCNEKFSYFPQMEVT |
| | 95) with 3 additional aa at N- | QPTSNPVTPKPP |
| | terminus | |
| 1477 | N22Q mutant of Hybrid hu- | RGEAETRECIYYNANWELERTQQSGLERCEGEQDKRLHCYASWRNSSGTIE |
| | ActRIIB-ECD (SEQ ID NO: | LVKKGCWLDDFNCYDRQECVATEESPQVYFCCCEGNFCNEKFSYFPQMEVT |
| | 95) with 4 additional aa at N- | QPTSNPVTPKPP |
| | terminus | |
| 1478 | N23Q mutant of Hybrid hu- | GRGEAETRECIYYNANWELERTQQSGLERCEGEQDKRLHCYASWRNSSGTI |
| | ActRIIB-ECD (SEQ ID NO: | ELVKKGCWLDDFNCYDRQECVATEESPQVYFCCCEGNFCNEKFSYFPQMEV |
| | 95) with 5 additional aa at N- | TQPTSNPVTPKPP |
| | terminus | |
| 1479 | N24Q mutant of Hybrid hu- | SGRGEAETRECIYYNANWELERTQQSGLERCEGEQDKRLHCYASWRNSSGT |
| | ActRIIB-ECD (SEQ ID NO: | IELVKKGCWLDDFNCYDRQECVATEESPQVYFCCCEGNFCNEKFSYFPQME |
| | 95) with 6 additional aa at N- | VTQPTSNPVTPKPP |
| | terminus | |
| 1480 | N19Q mutant of Hybrid hu- | AETRECIYYNANWELERTQQSGLERCEGEQDKRLHCYASWRNSSGTIELVK |
| | ActRIIB-ECD (SEQ ID NO: | KGCWLDDFNCYDRQECVATEENPEVYFCCCEGNFCNEKFSYFPQMEVTQPT |
| | 96) with 1 additional aa at N- | SNPVTPKPP |
| | terminus | |
| 1481 | N20Q mutant of Hybrid hu- | EAETRECIYYNANWELERTQQSGLERCEGEQDKRLHCYASWRNSSGTIELV |
| | ActRIIB-ECD (SEQ ID NO: | KKGCWLDDFNCYDRQECVATEENPEVYFCCCEGNFCNEKFSYFPQMEVTQP |
| | 96) with 2 additional aa at N- | TSNPVTPKPP |
| | terminus | |
| 1482 | N21Q mutant of Hybrid hu- | GEAETRECIYYNANWELERTQQSGLERCEGEQDKRLHCYASWRNSSGTIEL |
| | ActRIIB-ECD (SEQ ID NO: | VKKGCWLDDFNCYDRQECVATEENPEVYFCCCEGNFCNEKFSYFPQMEVT |
| | 96) with 3 additional aa at N- | QPTSNPVTPKPP |
| | terminus | |
| 1483 | N22Q mutant of Hybrid hu- | RGEAETRECIYYNANWELERTQQSGLERCEGEQDKRLHCYASWRNSSGTIE |
| | ActRIIB-ECD (SEQ ID NO: | LVKKGCWLDDFNCYDRQECVATEENPEVYFCCCEGNFCNEKFSYFPQMEVT |
| | 96) with 4 additional aa at N- | QPTSNPVTPKPP |
| | terminus | |
| 1484 | N23Q mutant of Hybrid hu- | GRGEAETRECIYYNANWELERTQQSGLERCEGEQDKRLHCYASWRNSSGTI |
| | ActRIIB-ECD (SEQ ID NO: | ELVKKGCWLDDFNCYDRQECVATEENPEVYFCCCEGNFCNEKFSYFPQMEV |
| | 96) with 5 additional aa at N- | TQPTSNPVTPKPP |
| | terminus | |
| 1485 | N24Q mutant of Hybrid hu- | SGRGEAETRECIYYNANWELERTQQSGLERCEGEQDKRLHCYASWRNSSGT |
| | ActRIIB-ECD (SEQ ID NO: | IELVKKGCWLDDFNCYDRQECVATEENPEVYFCCCEGNFCNEKFSYFPQME |
| | 96) with 6 additional aa at N- | VTQPTSNPVTPKPP |
| | terminus | |
| 1486 | N19Q mutant of Hybrid hu- | AETRECIYYNANWELERTQQSGLERCEGDKDKRLHCYASWRNSSGTIELVK |
| | ActRIIB-ECD (SEQ ID NO: | KGCWLDDFNCYDRQECVETEENPQVYFCCCEGNFCNEKFSYFPQMEVTQPT |
| | 97) with 1 additional aa at N- | SNPVTPKPP |
| | terminus | |
| 1487 | N20Q mutant of Hybrid hu- | EAETRECIYYNANWELERTQQSGLERCEGDKDKRLHCYASWRNSSGTIELV |
| | ActRIIB-ECD (SEQ ID NO: | KKGCWLDDFNCYDRQECVETEENPQVYFCCCEGNFCNEKFSYFPQMEVTQP |
| | 97) with 2 additional aa at N- | TSNPVTPKPP |
| | terminus | |
| 1488 | N21Q mutant of Hybrid hu- | GEAETRECIYYNANWELERTQQSGLERCEGDKDKRLHCYASWRNSSGTIEL |
| | ActRIIB-ECD (SEQ ID NO: | VKKGCWLDDFNCYDRQECVETEENPQVYFCCCEGNFCNEKFSYFPQMEVT |
| | 97) with 3 additional aa at N- | QPTSNPVTPKPP |
| | terminus | |
| 1489 | N22Q mutant of Hybrid hu- | RGEAETRECIYYNANWELERTQQSGLERCEGDKDKRLHCYASWRNSSGTIE |
| | ActRIIB-ECD (SEQ ID NO: | LVKKGCWLDDFNCYDRQECVETEENPQVYFCCCEGNFCNEKFSYFPQMEVT |
| | 97) with 4 additional aa at N- | QPTSNPVTPKPP |
| | terminus | |
| 1490 | N23Q mutant of Hybrid hu- | GRGEAETRECIYYNANWELERTQQSGLERCEGDKDKRLHCYASWRNSSGTI |
| | ActRIIB-ECD (SEQ ID NO: | ELVKKGCWLDDFNCYDRQECVETEENPQVYFCCCEGNFCNEKFSYFPQMEV |
| | 97) with 5 additional aa at N- | TQPTSNPVTPKPP |
| | terminus | |
| 1491 | N24Q mutant of Hybrid hu- | SGRGEAETRECIYYNANWELERTQQSGLERCEGDKDKRLHCYASWRNSSGT |
| | ActRIIB-ECD (SEQ ID NO: | IELVKKGCWLDDFNCYDRQECVETEENPQVYFCCCEGNFCNEKFSYFPQME |
| | 97) with 6 additional aa at N- | VTQPTSNPVTPKPP |
| | terminus | |
| 1492 | N19Q mutant of Hybrid hu- | AETRECIYYNANWELERTQQSGLERCEGEKDKRLHCYASWRNSSGTIELVK |
| | ActRIIB-ECD (SEQ ID NO: | KGCWLDDFNCYDRQECVAKEENPQVYFCCCEGNFCNEKFSYFPQMEVTQP |
| | 98) with 1 additional aa at N- | TSNPVTPKPP |
| | terminus | |
| 1493 | N20Q mutant of Hybrid hu- | EAETRECIYYNANWELERTQQSGLERCEGEKDKRLHCYASWRNSSGTIELV |
| | ActRIIB-ECD (SEQ ID NO: | KKGCWLDDFNCYDRQECVAKEENPQVYFCCCEGNFCNEKFSYFPQMEVTQ |
| | 98) with 2 additional aa at N- | PTSNPVTPKPP |
| | terminus | |
| 1494 | N21Q mutant of Hybrid hu- | GEAETRECIYYNANWELERTQQSGLERCEGEKDKRLHCYASWRNSSGTIEL |
| | ActRIIB-ECD (SEQ ID NO: | VKKGCWLDDFNCYDRQECVAKEENPQVYFCCCEGNFCNEKFSYFPQMEVT |
| | 98) with 3 additional aa at N- | QPTSNPVTPKPP |
| | terminus | |
| 1495 | N22Q mutant of Hybrid hu- | RGEAETRECIYYNANWELERTQQSGLERCEGEKDKRLHCYASWRNSSGTIE |
| | ActRIIB-ECD (SEQ ID NO: | LVKKGCWLDDFNCYDRQECVAKEENPQVYFCCCEGNFCNEKFSYFPQMEV |
| | 98) with 4 additional aa at N- | TQPTSNPVTPKPP |
| | terminus | |
| 1496 | N23Q mutant of Hybrid hu- | GRGEAETRECIYYNANWELERTQQSGLERCEGEKDKRLHCYASWRNSSGTI |
| | ActRIIB-ECD (SEQ ID NO: | ELVKKGCWLDDFNCYDRQECVAKEENPQVYFCCCEGNFCNEKFSYFPQME |
| | 98) with 5 additional aa at N- | VTQPTSNPVTPKPP |
| | terminus | |
| 1497 | N24Q mutant of Hybrid hu- | SGRGEAETRECIYYNANWELERTQQSGLERCEGEKDKRLHCYASWRNSSGT |
| | ActRIIB-ECD (SEQ ID NO: | IELVKKGCWLDDFNCYDRQECVAKEENPQVYFCCCEGNFCNEKFSYFPQME |
| | 98) with 6 additional aa at N- | VTQPTSNPVTPKPP |
| | terminus | |
| 1498 | N19Q mutant of Hybrid hu- | AETRECIYYNANWELERTQQSGLERCEGDQDKRLHCYASWRNSSGTIELVK |
| | ActRIIB-ECD (SEQ ID NO: | KGCWLDDFNCYDRQECVATKENPQVYFCCCEGNFCNEKFSYFPQMEVTQP |
| | 99) with 1 additional aa at N- | TSNPVTPKPP |
| | terminus | |
| 1499 | N20Q mutant of Hybrid hu- | EAETRECIYYNANWELERTQQSGLERCEGDQDKRLHCYASWRNSSGTIELV |
| | ActRIIB-ECD (SEQ ID NO: | KKGCWLDDFNCYDRQECVATKENPQVYFCCCEGNFCNEKFSYFPQMEVTQ |
| | 99) with 2 additional aa at N- | PTSNPVTPKPP |
| | terminus | |
| 1500 | N21Q mutant of Hybrid hu- | GEAETRECIYYNANWELERTQQSGLERCEGDQDKRLHCYASWRNSSGTIEL |
| | ActRIIB-ECD (SEQ ID NO: | VKKGCWLDDFNCYDRQECVATKENPQVYFCCCEGNFCNEKFSYFPQMEVT |
| | 99) with 3 additional aa at N- | QPTSNPVTPKPP |
| | terminus | |
| 1501 | N22Q mutant of Hybrid hu- | RGEAETRECIYYNANWELERTQQSGLERCEGDQDKRLHCYASWRNSSGTIE |
| | ActRIIB-ECD (SEQ ID NO: | LVKKGCWLDDFNCYDRQECVATKENPQVYFCCCEGNFCNEKFSYFPQMEV |
| | 99) with 4 additional aa at N- | TQPTSNPVTPKPP |
| | terminus | |
| 1502 | N23Q mutant of Hybrid hu- | GRGEAETRECIYYNANWELERTQQSGLERCEGDQDKRLHCYASWRNSSGTI |
| | ActRIIB-ECD (SEQ ID NO: | ELVKKGCWLDDFNCYDRQECVATKENPQVYFCCCEGNFCNEKFSYFPQME |
| | 99) with 5 additional aa at N- | VTQPTSNPVTPKPP |
| | terminus | |
| 1503 | N24Q mutant of Hybrid hu- | SGRGEAETRECIYYNANWELERTQQSGLERCEGDQDKRLHCYASWRNSSGT |
| | ActRIIB-ECD (SEQ ID NO: | IELVKKGCWLDDFNCYDRQECVATKENPQVYFCCCEGNFCNEKFSYFPQME |
| | 99) with 6 additional aa at N- | VTQPTSNPVTPKPP |
| | terminus | |
| 1504 | N19Q mutant of Hybrid hu- | AETRECIYYNANWELERTQQSGLERCEGDKDKRLHCYASWRNSSGTIELVK |
| | ActRIIB-ECD (SEQ ID NO: | QGCWLDDFNCYDRQECVAKKENPQVYFCCCEGNFCNEKFSYFPQMEVTQP |
| | 100) with 1 additional aa at | TSNPVTPKPP |
| | N-terminus | |
| 1505 | N20Q mutant of Hybrid hu- | EAETRECIYYNANWELERTQQSGLERCEGDKDKRLHCYASWRNSSGTIELV |
| | ActRIIB-ECD (SEQ ID NO: | KQGCWLDDFNCYDRQECVAKKENPQVYFCCCEGNFCNEKFSYFPQMEVTQ |
| | 100) with 2 additional aa at | PTSNPVTPKPP |
| | N-terminus | |
| 1506 | N21Q mutant of Hybrid hu- | GEAETRECIYYNANWELERTQQSGLERCEGDKDKRLHCYASWRNSSGTIEL |
| | ActRIIB-ECD (SEQ ID NO: | VKQGCWLDDFNCYDRQECVAKKENPQVYFCCCEGNFCNEKFSYFPQMEVT |
| | 100) with 3 additional aa at | QPTSNPVTPKPP |
| | N-terminus | |
| 1507 | N22Q mutant of Hybrid hu- | RGEAETRECIYYNANWELERTQQSGLERCEGDKDKRLHCYASWRNSSGTIE |
| | ActRIIB-ECD (SEQ ID NO: | LVKQGCWLDDFNCYDRQECVAKKENPQVYFCCCEGNFCNEKFSYFPQMEV |
| | 100) with 4 additional aa at | TQPTSNPVTPKPP |
| | N-terminus | |
| 1508 | N23Q mutant of Hybrid hu- | GRGEAETRECIYYNANWELERTQQSGLERCEGDKDKRLHCYASWRNSSGTI |
| | ActRIIB-ECD (SEQ ID NO: | ELVKQGCWLDDFNCYDRQECVAKKENPQVYFCCCEGNFCNEKFSYFPQME |
| | 100) with 5 additional aa at | VTQPTSNPVTPKPP |
| | N-terminus | |
| 1509 | N24Q mutant of Hybrid hu- | SGRGEAETRECIYYNANWELERTQQSGLERCEGDKDKRLHCYASWRNSSGT |
| | ActRIIB-ECD (SEQ ID NO: | IELVKQGCWLDDFNCYDRQECVAKKENPQVYFCCCEGNFCNEKFSYFPQME |
| | 100) with 6 additional aa at | VTQPTSNPVTPKPP |
| | N-terminus | |
| 1510 | N19Q mutant of Hybrid hu- | AETRECIYYNANWELERTQQSGLERCEGDKDKRLHCYASWRNSSGTIEIVK |
| | ActRIIB-ECD (SEQ ID NO: | QGCWLDDFNCYDRQECVAEKENPQVYFCCCEGNFCNEKFSYFPQMEVTQP |
| | 101) with 1 additional aa at | TSNPVTPKPP |
| | N-terminus | |
| 1511 | N20Q mutant of Hybrid hu- | EAETRECIYYNANWELERTQQSGLERCEGDKDKRLHCYASWRNSSGTIEIVK |
| | ActRIIB-ECD (SEQ ID NO: | QGCWLDDFNCYDRQECVAEKENPQVYFCCCEGNFCNEKFSYFPQMEVTQP |
| | 101) with 2 additional aa at | TSNPVTPKPP |
| | N-terminu | |
| 1512 | N21Q mutant of Hybrid hu- | GEAETRECIYYNANWELERTQQSGLERCEGDKDKRLHCYASWRNSSGTIEIV |
| | ActRIIB-ECD (SEQ ID NO: | KQGCWLDDFNCYDRQECVAEKENPQVYFCCCEGNFCNEKFSYFPQMEVTQ |
| | 101) with 3 additional aa at | PTSNPVTPKPP |
| | N-terminus | |
| 1513 | N22Q mutant of Hybrid hu- | RGEAETRECIYYNANWELERTQQSGLERCEGDKDKRLHCYASWRNSSGTIEI |
| | ActRIIB-ECD (SEQ ID NO: | VKQGCWLDDFNCYDRQECVAEKENPQVYFCCCEGNFCNEKFSYFPQMEVT |
| | 101) with 4 additional aa at | QPTSNPVTPKPP |
| | N-terminus | |
| 1514 | N23Q mutant of Hybrid hu- | GRGEAETRECIYYNANWELERTQQSGLERCEGDKDKRLHCYASWRNSSGTI |
| | ActRIIB-ECD (SEQ ID NO: | EIVKQGCWLDDFNCYDRQECVAEKENPQVYFCCCEGNFCNEKFSYFPQMEV |
| | 101) with 5 additional aa at | TQPTSNPVTPKPP |
| | N-terminus | |
| 1515 | N24Q mutant of Hybrid hu- | SGRGEAETRECIYYNANWELERTQQSGLERCEGDKDKRLHCYASWRNSSGT |
| | ActRIIB-ECD (SEQ ID NO: | IEIVKQGCWLDDFNCYDRQECVAEKENPQVYFCCCEGNFCNEKFSYFPQME |
| | 101) with 6 additional aa at | VTQPTSNPVTPKPP |
| | N-terminus | |
| 1516 | N19Q mutant of Hybrid hu- | AETRECIYYNANWELERTQQSGLERCYGDQDKRLHCYASWRNSSGSIEIVK |
| | ActRIIB-ECD (SEQ ID NO: | QGCWLDDFNCYDRQECVAKKENPQVYFCCCEGNFCNEKFSYFPQMEVTQP |
| | 102) with 1 additional aa at | TSNPVTPKPP |
| | N-terminus | |
| 1517 | N20Q mutant of Hybrid hu- | EAETRECIYYNANWELERTQQSGLERCYGDQDKRLHCYASWRNSSGSIEIVK |
| | ActRIIB-ECD (SEQ ID NO: | QGCWLDDFNCYDRQECVAKKENPQVYFCCCEGNFCNEKFSYFPQMEVTQP |
| | 102) with 2 additional aa at | TSNPVTPKPP |
| | N-terminus | |
| 1518 | N21Q mutant of Hybrid hu- | GEAETRECIYYNANWELERTQQSGLERCYGDQDKRLHCYASWRNSSGSIEIV |
| | ActRIIB-ECD (SEQ ID NO: | KQGCWLDDFNCYDRQECVAKKENPQVYFCCCEGNFCNEKFSYFPQMEVTQ |
| | 102) with 3 additional aa at | PTSNPVTPKPP |
| | N-terminus | |
| 1519 | N22Q mutant of Hybrid hu- | RGEAETRECIYYNANWELERTQQSGLERCYGDQDKRLHCYASWRNSSGSIEI |
| | ActRIIB-ECD (SEQ ID NO: | VKQGCWLDDFNCYDRQECVAKKENPQVYFCCCEGNFCNEKFSYFPQMEVT |
| | 102) with 4 additional aa at | QPTSNPVTPKPP |
| | N-terminus | |
| 1520 | N23Q mutant of Hybrid hu- | GRGEAETRECIYYNANWELERTQQSGLERCYGDQDKRLHCYASWRNSSGSI |
| | ActRIIB-ECD (SEQ ID NO: | EIVKQGCWLDDFNCYDRQECVAKKENPQVYFCCCEGNFCNEKFSYFPQME |
| | 102) with 5 additional aa at | VTQPTSNPVTPKPP |
| | N-terminus | |
| 1521 | N24Q mutant of Hybrid hu- | SGRGEAETRECIYYNANWELERTQQSGLERCYGDQDKRLHCYASWRNSSGS |
| | ActRIIB-ECD (SEQ ID NO: | IEIVKQGCWLDDFNCYDRQECVAKKENPQVYFCCCEGNFCNEKFSYFPQME |
| | 102) with 6 additional aa at | VTQPTSNPVTPKPP |
| | N-terminus | |
| 1522 | N19Q mutant of Hybrid hu- | AETRECIYYNANWELERTQQSGLERCEGEKDKRRHCYASWRNSSGTIEIVKK |
| | ActRIIB-ECD (SEQ ID NO: | GCWLDDFNCYDRQECVATKENPQVYFCCCEGNFCNEKFSYFPQMEVTQPTS |
| | 103) with 1 additional aa at | NPVTPKPP |
| | N-terminus | |
| 1523 | N20Q mutant of Hybrid hu- | EAETRECIYYNANWELERTQQSGLERCEGEKDKRRHCYASWRNSSGTIEIVK |
| | ActRIIB-ECD (SEQ ID NO: | KGCWLDDFNCYDRQECVATKENPQVYFCCCEGNFCNEKFSYFPQMEVTQP |
| | 103) with 2 additional aa at | TSNPVTPKPP |
| | N-terminus | |
| 1524 | N21Q mutant of Hybrid hu- | GEAETRECIYYNANWELERTQQSGLERCEGEKDKRRHCYASWRNSSGTIEIV |
| | ActRIIB-ECD (SEQ ID NO: | KKGCWLDDFNCYDRQECVATKENPQVYFCCCEGNFCNEKFSYFPQMEVTQ |
| | 103) with 3 additional aa at | PTSNPVTPKPP |
| | N-terminus | |
| 1525 | N22Q mutant of Hybrid hu- | RGEAETRECIYYNANWELERTQQSGLERCEGEKDKRRHCYASWRNSSGTIEI |
| | ActRIIB-ECD (SEQ ID NO: | VKKGCWLDDFNCYDRQECVATKENPQVYFCCCEGNFCNEKFSYFPQMEVT |
| | 103) with 4 additional aa at | QPTSNPVTPKPP |
| | N-terminus | |
| 1526 | N23Q mutant of Hybrid hu- | GRGEAETRECIYYNANWELERTQQSGLERCEGEKDKRRHCYASWRNSSGTI |
| | ActRIIB-ECD (SEQ ID NO: | EIVKKGCWLDDFNCYDRQECVATKENPQVYFCCCEGNFCNEKFSYFPQMEV |
| | 103) with 5 additional aa at | TQPTSNPVTPKPP |
| | N-terminus | |
| 1527 | N24Q mutant of Hybrid hu- | SGRGEAETRECIYYNANWELERTQQSGLERCEGEKDKRRHCYASWRNSSGT |
| | ActRIIB-ECD (SEQ ID NO: | IEIVKKGCWLDDFNCYDRQECVATKENPQVYFCCCEGNFCNEKFSYFPQME |
| | 103) with 5 additional aa at | VTQPTSNPVTPKPP |
| | N-terminus | |
| 1528 | N19Q mutant of Hybrid hu- | AETRECIYYNANWELERTQQSGLERCYGDQDKRRHCYASWRNSSGTIELVK |
| | ActRIIB-ECD (SEQ ID NO: | KGCWLDDFNCYDRQECVATEENPEVYFCCCEGNFCNEKFSYFPQMEVTQPT |
| | 104) with 1 additional aa at | SNPVTPKPP |
| | N-terminus | |
| 1529 | N20Q mutant of Hybrid hu- | EAETRECIYYNANWELERTQQSGLERCYGDQDKRRHCYASWRNSSGTIELV |
| | ActRIIB-ECD (SEQ ID NO: | KKGCWLDDFNCYDRQECVATEENPEVYFCCCEGNFCNEKFSYFPQMEVTQP |
| | 104) with 2 additional aa at | TSNPVTPKPP |
| | N-terminus | |
| 1530 | N21Q mutant of Hybrid hu- | GEAETRECIYYNANWELERTQQSGLERCYGDQDKRRHCYASWRNSSGTIEL |
| | ActRIIB-ECD (SEQ ID NO: | VKKGCWLDDFNCYDRQECVATEENPEVYFCCCEGNFCNEKFSYFPQMEVT |
| | 104) with 3 additional aa at | QPTSNPVTPKPP |
| | N-terminus | |
| 1531 | N22Q mutant of Hybrid hu- | RGEAETRECIYYNANWELERTQQSGLERCYGDQDKRRHCYASWRNSSGTIE |
| | ActRIIB-ECD (SEQ ID NO: | LVKKGCWLDDFNCYDRQECVATEENPEVYFCCCEGNFCNEKFSYFPQMEVT |
| | 104) with 4 additional aa at | QPTSNPVTPKPP |
| | N-terminus | |
| 1532 | N23Q mutant of Hybrid hu- | GRGEAETRECIYYNANWELERTQQSGLERCYGDQDKRRHCYASWRNSSGTI |
| | ActRIIB-ECD (SEQ ID NO: | ELVKKGCWLDDFNCYDRQECVATEENPEVYFCCCEGNFCNEKFSYFPQMEV |
| | 104) with 5 additional aa at | TQPTSNPVTPKPP |
| | N-terminus | |
| 1533 | N24Q mutant of Hybrid hu- | SGRGEAETRECIYYNANWELERTQQSGLERCYGDQDKRRHCYASWRNSSG |
| | ActRIIB-ECD (SEQ ID NO: | TIELVKKGCWLDDFNCYDRQECVATEENPEVYFCCCEGNFCNEKFSYFPQM |
| | 104) with 6 additional aa at | EVTQPTSNPVTPKPP |
| | N-terminus | |
| 1534 | N19Q mutant of Hybrid hu- | AETRECIYYNANWELERTQQSGLERCEGEQDKRRHCYASWRNSSGTIELVK |
| | ActRIIB-ECD (SEQ ID NO: | KGCWLDDFNCYDRQECVATEENPQVYFCCCEGNFCNEKFSYFPQMEVTQPT |
| | 105) with 1 additional aa at | SNPVTPKPP |
| | N-terminus | |
| 1535 | N20Q mutant of Hybrid hu- | EAETRECIYYNANWELERTQQSGLERCEGEQDKRRHCYASWRNSSGTIELV |
| | ActRIIB-ECD (SEQ ID NO: | KKGCWLDDFNCYDRQECVATEENPQVYFCCCEGNFCNEKFSYFPQMEVTQ |
| | 105) with 2 additional aa at | PTSNPVTPKPP |
| | N-terminus | |
| 1536 | N21Q mutant of Hybrid hu- | GEAETRECIYYNANWELERTQQSGLERCEGEQDKRRHCYASWRNSSGTIEL |
| | ActRIIB-ECD (SEQ ID NO: | VKKGCWLDDFNCYDRQECVATEENPQVYFCCCEGNFCNEKFSYFPQMEVT |
| | 105) with 3 additional aa at | QPTSNPVTPKPP |
| | N-terminus | |
| 1537 | N22Q mutant of Hybrid hu- | RGEAETRECIYYNANWELERTQQSGLERCEGEQDKRRHCYASWRNSSGTIE |
| | ActRIIB-ECD (SEQ ID NO: | LVKKGCWLDDFNCYDRQECVATEENPQVYFCCCEGNFCNEKFSYFPQMEV |
| | 105) with 4 additional aa at | TQPTSNPVTPKPP |
| | N-terminus | |
| 1538 | N23Q mutant of Hybrid hu- | GRGEAETRECIYYNANWELERTQQSGLERCEGEQDKRRHCYASWRNSSGTI |
| | ActRIIB-ECD (SEQ ID NO: | ELVKKGCWLDDFNCYDRQECVATEENPQVYFCCCEGNFCNEKFSYFPQME |
| | 105) with 5 additional aa at | VTQPTSNPVTPKPP |
| | N-terminus | |
| 1539 | N24Q mutant of Hybrid hu- | SGRGEAETRECIYYNANWELERTQQSGLERCEGEQDKRRHCYASWRNSSGT |
| | ActRIIB-ECD (SEQ ID NO: | IELVKKGCWLDDFNCYDRQECVATEENPQVYFCCCEGNFCNEKFSYFPQME |
| | 105) with 6 additional aa at | VTQPTSNPVTPKPP |
| | N-terminus | |
| 1540 | N19Q mutant of Hybrid hu- | AETRECIYYNANWELERTQQSGLERCYGEQDKRLHCYASWRNSSGSIEIVKK |
| | ActRIIB-ECD (SEQ ID NO: | GCWLDDFNCYDRTDCVATEENPQVYFCCCEGNFCNEKFSYFPQMEVTQPTS |
| | 106) with 1 additional aa at | NPVTPKPP |
| | N-terminus | |
| 1541 | N20Q mutant of Hybrid hu- | EAETRECIYYNANWELERTQQSGLERCYGEQDKRLHCYASWRNSSGSIEIVK |
| | ActRIIB-ECD (SEQ ID NO: | KGCWLDDFNCYDRTDCVATEENPQVYFCCCEGNFCNEKFSYFPQMEVTQPT |
| | 106) with 2 additional aa at | SNPVTPKPP |
| | N-terminus | |
| 1542 | N21Q mutant of Hybrid hu- | GEAETRECIYYNANWELERTQQSGLERCYGEQDKRLHCYASWRNSSGSIEIV |
| | ActRIIB-ECD (SEQ ID NO: | KKGCWLDDFNCYDRTDCVATEENPQVYFCCCEGNFCNEKFSYFPQMEVTQ |
| | 106) with 3 additional aa at | PTSNPVTPKPP |
| | N-terminus | |
| 1543 | N22Q mutant of Hybrid hu- | RGEAETRECIYYNANWELERTQQSGLERCYGEQDKRLHCYASWRNSSGSIEI |
| | ActRIIB-ECD (SEQ ID NO: | VKKGCWLDDFNCYDRTDCVATEENPQVYFCCCEGNFCNEKFSYFPQMEVT |
| | 106) with 4 additional aa at | QPTSNPVTPKPP |
| | N-terminus | |
| 1544 | N23Q mutant of Hybrid hu- | GRGEAETRECIYYNANWELERTQQSGLERCYGEQDKRLHCYASWRNSSGSI |
| | ActRIIB-ECD (SEQ ID NO: | EIVKKGCWLDDFNCYDRTDCVATEENPQVYFCCCEGNFCNEKFSYFPQMEV |
| | 106) with 5 additional aa at | TQPTSNPVTPKPP |
| | N-terminus | |
| 1545 | N24Q mutant of Hybrid hu- | SGRGEAETRECIYYNANWELERTQQSGLERCYGEQDKRLHCYASWRNSSGS |
| | ActRIIB-ECD (SEQ ID NO: | IEIVKKGCWLDDFNCYDRTDCVATEENPQVYFCCCEGNFCNEKFSYFPQME |
| | 106) with 6 additional aa at | VTQPTSNPVTPKPP |
| | N-terminus | |
| 1546 | N19Q mutant of Hybrid hu- | AETRECIYYNANWELERTQQSGLERCEGEQDKRRHCYASWRNSSGSIELVK |
| | ActRIIB-ECD (SEQ ID NO: | KGCWLDDFNCYDRQECVAKEENPQVYFCCCEGNFCNEKFSYFPQMEVTQP |
| | 107) with 1 additional aa at | TSNPVTPKPP |
| | N-terminus | |
| 1547 | N20Q mutant of Hybrid hu- | EAETRECIYYNANWELERTQQSGLERCEGEQDKRRHCYASWRNSSGSIELV |
| | ActRIIB-ECD (SEQ ID NO: | KKGCWLDDFNCYDRQECVAKEENPQVYFCCCEGNFCNEKFSYFPQMEVTQ |
| | 107) with 2 additional aa at | PTSNPVTPKPP |
| | N-terminus | |
| 1548 | N21Q mutant of Hybrid hu- | GEAETRECIYYNANWELERTQQSGLERCEGEQDKRRHCYASWRNSSGSIEL |
| | ActRIIB-ECD (SEQ ID NO: | VKKGCWLDDFNCYDRQECVAKEENPQVYFCCCEGNFCNEKFSYFPQMEVT |
| | 107) with 3 additional aa at | QPTSNPVTPKPP |
| | N-terminus | |
| 1549 | N22Q mutant of Hybrid hu- | RGEAETRECIYYNANWELERTQQSGLERCEGEQDKRRHCYASWRNSSGSIE |
| | ActRIIB-ECD (SEQ ID NO: | LVKKGCWLDDFNCYDRQECVAKEENPQVYFCCCEGNFCNEKFSYFPQMEV |
| | 107) with 4 additional aa at | TQPTSNPVTPKPP |
| | N-terminus | |
| 1550 | N23Q mutant of Hybrid hu- | GRGEAETRECIYYNANWELERTQQSGLERCEGEQDKRRHCYASWRNSSGSI |
| | ActRIIB-ECD (SEQ ID NO: | ELVKKGCWLDDFNCYDRQECVAKEENPQVYFCCCEGNFCNEKFSYFPQME |
| | 107) with 5 additional aa at | VTQPTSNPVTPKPP |
| | N-terminus | |
| 1551 | N24Q mutant of Hybrid hu- | SGRGEAETRECIYYNANWELERTQQSGLERCEGEQDKRRHCYASWRNSSGS |
| | ActRIIB-ECD (SEQ ID NO: | IELVKKGCWLDDFNCYDRQECVAKEENPQVYFCCCEGNFCNEKFSYFPQME |
| | 107) with 6 additional aa at | VTQPTSNPVTPKPP |
| | N-terminus | |
| 1552 | N19Q mutant of Hybrid hu- | AETRECIYYNANWELERTQQSGLERCEGEQDKRRHCYASWRNSSGTIEIVKK |
| | ActRIIB-ECD (SEQ ID NO: | GCWLDDFNCYDRQECVAKEENPQVYFCCCEGNFCNEKFSYFPQMEVTQPTS |
| | 108) with 1 additional aa at | NPVTPKPP |
| | N-terminus | |
| 1553 | N20Q mutant of Hybrid hu- | EAETRECIYYNANWELERTQQSGLERCEGEQDKRRHCYASWRNSSGTIEIVK |
| | ActRIIB-ECD (SEQ ID NO: | KGCWLDDFNCYDRQECVAKEENPQVYFCCCEGNFCNEKFSYFPQMEVTQP |
| | 108) with 2 additional aa at | TSNPVTPKPP |
| | N-terminus | |
| 1554 | N21Q mutant of Hybrid hu- | GEAETRECIYYNANWELERTQQSGLERCEGEQDKRRHCYASWRNSSGTIEIV |
| | ActRIIB-ECD (SEQ ID NO: | KKGCWLDDFNCYDRQECVAKEENPQVYFCCCEGNFCNEKFSYFPQMEVTQ |
| | 108) with 3 additional aa at | PTSNPVTPKPP |
| | N-terminus | |
| 1555 | N22Q mutant of Hybrid hu- | RGEAETRECIYYNANWELERTQQSGLERCEGEQDKRRHCYASWRNSSGTIEI |
| | ActRIIB-ECD (SEQ ID NO: | VKKGCWLDDFNCYDRQECVAKEENPQVYFCCCEGNFCNEKFSYFPQMEVT |
| | 108) with 4 additional aa at | QPTSNPVTPKPP |
| | N-terminus | |
| 1556 | N23Q mutant of Hybrid hu- | GRGEAETRECIYYNANWELERTQQSGLERCEGEQDKRRHCYASWRNSSGTI |
| | ActRIIB-ECD (SEQ ID NO: | EIVKKGCWLDDFNCYDRQECVAKEENPQVYFCCCEGNFCNEKFSYFPQMEV |
| | 108) with 5 additional aa at | TQPTSNPVTPKPP |
| | N-terminus | |
| 1557 | N24Q mutant of Hybrid hu- | SGRGEAETRECIYYNANWELERTQQSGLERCEGEQDKRRHCYASWRNSSGT |
| | ActRIIB-ECD (SEQ ID NO: | IEIVKKGCWLDDFNCYDRQECVAKEENPQVYFCCCEGNFCNEKFSYFPQME |
| | 108) with 6 additional aa at | VTQPTSNPVTPKPP |
| | N-terminus | |
| 1558 | N19Q mutant of Hybrid hu- | AETRECIYYNANWELERTQQSGLERCEGEQDKRRHCYASWRNSSGSIEIVKK |
| | ActRIIB-ECD (SEQ ID NO: | GCWLDDFNCYDRQECVATKENPQVYFCCCEGNFCNEKFSYFPQMEVTQPTS |
| | 109) with 1 additional aa at | NPVTPKPP |
| | N-terminus | |
| 1559 | N20Q mutant of Hybrid hu- | EAETRECIYYNANWELERTQQSGLERCEGEQDKRRHCYASWRNSSGSIEIVK |
| | ActRIIB-ECD (SEQ ID NO: | KGCWLDDFNCYDRQECVATKENPQVYFCCCEGNFCNEKFSYFPQMEVTQP |
| | 109) with 2 additional aa at | TSNPVTPKPP |
| | N-terminus | |
| 1560 | N21Q mutant of Hybrid hu- | GEAETRECIYYNANWELERTQQSGLERCEGEQDKRRHCYASWRNSSGSIEIV |
| | ActRIIB-ECD (SEQ ID NO: | KKGCWLDDFNCYDRQECVATKENPQVYFCCCEGNFCNEKFSYFPQMEVTQ |
| | 109) with 3 additional aa at | PTSNPVTPKPP |
| | N-terminus | |
| 1561 | N22Q mutant of Hybrid hu- | RGEAETRECIYYNANWELERTQQSGLERCEGEQDKRRHCYASWRNSSGSIEI |
| | ActRIIB-ECD (SEQ ID NO: | VKKGCWLDDFNCYDRQECVATKENPQVYFCCCEGNFCNEKFSYFPQMEVT |
| | 109) with 4 additional aa at | QPTSNPVTPKPP |
| | N-terminus | |
| 1562 | N23Q mutant of Hybrid hu- | GRGEAETRECIYYNANWELERTQQSGLERCEGEQDKRRHCYASWRNSSGSI |
| | ActRIIB-ECD (SEQ ID NO: | EIVKKGCWLDDFNCYDRQECVATKENPQVYFCCCEGNFCNEKFSYFPQMEV |
| | 109) with 5 additional aa at | TQPTSNPVTPKPP |
| | N-terminus | |
| 1563 | N24Q mutant of Hybrid hu- | SGRGEAETRECIYYNANWELERTQQSGLERCEGEQDKRRHCYASWRNSSGS |
| | ActRIIB-ECD (SEQ ID NO: | IEIVKKGCWLDDFNCYDRQECVATKENPQVYFCCCEGNFCNEKFSYFPQME |
| | 109) with 6 additional aa at | VTQPTSNPVTPKPP |
| | N-terminus | |
| 1564 | N19Q mutant of Hybrid hu- | AETRECIYYNANWELERTQQSGLERCEGDQDKRLHCYASWRNSSGTIEIVK |
| | ActRIIB-ECD (SEQ ID NO: | KGCWLDDFNCYDRQECVATKENPQVYFCCCEGNFCNEKFSYFPQMEVTQP |
| | 110) with 1 additional aa at | TSNPVTPKPP |
| | N-terminus | |
| 1565 | N20Q mutant of Hybrid hu- | EAETRECIYYNANWELERTQQSGLERCEGDQDKRLHCYASWRNSSGTIEIVK |
| | ActRIIB-ECD (SEQ ID NO: | KGCWLDDFNCYDRQECVATKENPQVYFCCCEGNFCNEKFSYFPQMEVTQP |
| | 110) with 2 additional aa at | TSNPVTPKPP |
| | N-terminus | |
| 1566 | N21Q mutant of Hybrid hu- | GEAETRECIYYNANWELERTQQSGLERCEGDQDKRLHCYASWRNSSGTIEIV |
| | ActRIIB-ECD (SEQ ID NO: | KKGCWLDDFNCYDRQECVATKENPQVYFCCCEGNFCNEKFSYFPQMEVTQ |
| | 110) with 3 additional aa at | PTSNPVTPKPP |
| | N-terminus | |
| 1567 | N22Q mutant of Hybrid hu- | RGEAETRECIYYNANWELERTQQSGLERCEGDQDKRLHCYASWRNSSGTIEI |
| | ActRIIB-ECD (SEQ ID NO: | VKKGCWLDDFNCYDRQECVATKENPQVYFCCCEGNFCNEKFSYFPQMEVT |
| | 110) with 4 additional aa at | QPTSNPVTPKPP |
| | N-terminus | |
| 1568 | N23Q mutant of Hybrid hu- | GRGEAETRECIYYNANWELERTQQSGLERCEGDQDKRLHCYASWRNSSGTI |
| | ActRIIB-ECD (SEQ ID NO: | EIVKKGCWLDDFNCYDRQECVATKENPQVYFCCCEGNFCNEKFSYFPQMEV |
| | 110) with 5 additional aa at | TQPTSNPVTPKPP |
| | N-terminus | |
| 1569 | N24Q mutant of Hybrid hu- | SGRGEAETRECIYYNANWELERTQQSGLERCEGDQDKRLHCYASWRNSSGT |
| | ActRIIB-ECD (SEQ ID NO: | IEIVKKGCWLDDFNCYDRQECVATKENPQVYFCCCEGNFCNEKFSYFPQME |
| | 110) with 6 additional aa at | VTQPTSNPVTPKPP |
| | N-terminus | |
| 1570 | N19Q mutant of Hybrid hu- | AETRECIYYNANWELERTQQSGLERCEGDQDKRLHCYASWRNSSGSIELVK |
| | ActRIIB-ECD (SEQ ID NO: | KGCWLDDFNCYDRQECVATKENPQVYFCCCEGNFCNEKFSYFPQMEVTQP |
| | 111) with 1 additional aa at | TSNPVTPKPP |
| | N-terminus | |
| 1571 | N20Q mutant of Hybrid hu- | EAETRECIYYNANWELERTQQSGLERCEGDQDKRLHCYASWRNSSGSIELV |
| | ActRIIB-ECD (SEQ ID NO: | KKGCWLDDFNCYDRQECVATKENPQVYFCCCEGNFCNEKFSYFPQMEVTQ |
| | 111) with 2 additional aa at | PTSNPVTPKPP |
| | N-terminus | |
| 1572 | N21Q mutant of Hybrid hu- | GEAETRECIYYNANWELERTQQSGLERCEGDQDKRLHCYASWRNSSGSIEL |
| | ActRIIB-ECD (SEQ ID NO: | VKKGCWLDDFNCYDRQECVATKENPQVYFCCCEGNFCNEKFSYFPQMEVT |
| | 111) with 3 additional aa at | QPTSNPVTPKPP |
| | N-terminus | |
| 1573 | N22Q mutant of Hybrid hu- | RGEAETRECIYYNANWELERTQQSGLERCEGDQDKRLHCYASWRNSSGSIE |
| | ActRIIB-ECD (SEQ ID NO: | LVKKGCWLDDFNCYDRQECVATKENPQVYFCCCEGNFCNEKFSYFPQMEV |
| | 111) with 4 additional aa at | TQPTSNPVTPKPP |
| | N-terminus | |
| 1574 | N23Q mutant of Hybrid hu- | GRGEAETRECIYYNANWELERTQQSGLERCEGDQDKRLHCYASWRNSSGSI |
| | ActRIIB-ECD (SEQ ID NO: | ELVKKGCWLDDFNCYDRQECVATKENPQVYFCCCEGNFCNEKFSYFPQME |
| | 111) with 5 additional aa at | VTQPTSNPVTPKPP |
| | N-terminus | |
| 1575 | N24Q mutant of Hybrid hu- | SGRGEAETRECIYYNANWELERTQQSGLERCEGDQDKRLHCYASWRNSSGS |
| | ActRIIB-ECD (SEQ ID NO: | IELVKKGCWLDDFNCYDRQECVATKENPQVYFCCCEGNFCNEKFSYFPQME |
| | 111) with 6 additional aa at | VTQPTSNPVTPKPP |
| | N-terminus | |
| 1576 | N19Q mutant of Hybrid hu- | AETRECIYYNANWELERTQQSGLERCEGDQDKRLHCYASWRNSSGTIELVK |
| | ActRIIB-ECD (SEQ ID NO: | KGCWLDDFNCYDRQECVATKENPQVYFCCCEGNFCNEKFSYFPQMEVTQP |
| | 112) with 1 additional aa at | TSNPVTPKPP |
| | N-terminus | |
| 1577 | N20Q mutant of Hybrid hu- | EAETRECIYYNANWELERTQQSGLERCEGDQDKRLHCYASWRNSSGTIELV |
| | ActRIIB-ECD (SEQ ID NO: | KKGCWLDDFNCYDRQECVATKENPQVYFCCCEGNFCNEKFSYFPQMEVTQ |
| | 112) with 2 additional aa at | PTSNPVTPKPP |
| | N-terminus | |
| 1578 | N21Q mutant of Hybrid hu- | GEAETRECIYYNANWELERTQQSGLERCEGDQDKRLHCYASWRNSSGTIEL |
| | ActRIIB-ECD (SEQ ID NO: | VKKGCWLDDFNCYDRQECVATKENPQVYFCCCEGNFCNEKFSYFPQMEVT |
| | 112) with 3 additional aa at | QPTSNPVTPKPP |
| | N-terminus | |
| 1579 | N22Q mutant of Hybrid hu- | RGEAETRECIYYNANWELERTQQSGLERCEGDQDKRLHCYASWRNSSGTIE |
| | ActRIIB-ECD (SEQ ID NO: | LVKKGCWLDDFNCYDRQECVATKENPQVYFCCCEGNFCNEKFSYFPQMEV |
| | 112) with 4 additional aa at | TQPTSNPVTPKPP |
| | N-terminus | |
| 1580 | N23Q mutant of Hybrid hu- | GRGEAETRECIYYNANWELERTQQSGLERCEGDQDKRLHCYASWRNSSGTI |
| | ActRIIB-ECD (SEQ ID NO: | ELVKKGCWLDDFNCYDRQECVATKENPQVYFCCCEGNFCNEKFSYFPQME |
| | 112) with 5 additional aa at | VTQPTSNPVTPKPP |
| | N-terminus | |
| 1581 | N24Q mutant of Hybrid hu- | SGRGEAETRECIYYNANWELERTQQSGLERCEGDQDKRLHCYASWRNSSGT |
| | ActRIIB-ECD (SEQ ID NO: | IELVKKGCWLDDFNCYDRQECVATKENPQVYFCCCEGNFCNEKFSYFPQME |
| | 112) with 6 additional aa at | VTQPTSNPVTPKPP |
| | N-terminus | |
| 1582 | N19Q mutant of Hybrid hu- | AETRECIYYNANWELERTQQSGLERCEGEQDKRLHCYASWRNSSGTIEIVKK |
| | ActRIIB-ECD (SEQ ID NO: | GCWLDDFNCYDRQECVATKENPQVYFCCCEGNFCNEKFSYFPQMEVTQPTS |
| | 113) with 1 additional aa at | NPVTPKPP |
| | N-terminus | |
| 1583 | N20Q mutant of Hybrid hu- | EAETRECIYYNANWELERTQQSGLERCEGEQDKRLHCYASWRNSSGTIEIVK |
| | ActRIIB-ECD (SEQ ID NO: | KGCWLDDFNCYDRQECVATKENPQVYFCCCEGNFCNEKFSYFPQMEVTQP |
| | 113) with 2 additional aa at | TSNPVTPKPP |
| | N-terminus | |
| 1584 | N21Q mutant of Hybrid hu- | GEAETRECIYYNANWELERTQQSGLERCEGEQDKRLHCYASWRNSSGTIEIV |
| | ActRIIB-ECD (SEQ ID NO: | KKGCWLDDFNCYDRQECVATKENPQVYFCCCEGNFCNEKFSYFPQMEVTQ |
| | 113) with 3 additional aa at | PTSNPVTPKPP |
| | N-terminus | |
| 1585 | N22Q mutant of Hybrid hu- | RGEAETRECIYYNANWELERTQQSGLERCEGEQDKRLHCYASWRNSSGTIEI |
| | ActRIIB-ECD (SEQ ID NO: | VKKGCWLDDFNCYDRQECVATKENPQVYFCCCEGNFCNEKFSYFPQMEVT |
| | 113) with 4 additional aa at | QPTSNPVTPKPP |
| | N-terminus | |
| 1586 | N23Q mutant of Hybrid hu- | GRGEAETRECIYYNANWELERTQQSGLERCEGEQDKRLHCYASWRNSSGTI |
| | ActRIIB-ECD (SEQ ID NO: | EIVKKGCWLDDFNCYDRQECVATKENPQVYFCCCEGNFCNEKFSYFPQMEV |
| | 113) with 5 additional aa at | TQPTSNPVTPKPP |
| | N-terminus | |
| 1587 | N24Q mutant of Hybrid hu- | SGRGEAETRECIYYNANWELERTQQSGLERCEGEQDKRLHCYASWRNSSGT |
| | ActRIIB-ECD (SEQ ID NO: | IEIVKKGCWLDDFNCYDRQECVATKENPQVYFCCCEGNFCNEKFSYFPQME |
| | 113) with 6 additional aa at | VTQPTSNPVTPKPP |
| | N-terminus | |
| 1588 | N19Q mutant of Hybrid hu- | AETRECIYYNANWELERTQQSGLERCEGEQDKRLHCYASWRNSSGTIELVK |
| | ActRIIB-ECD (SEQ ID NO: | KGCWLDDFNCYDRQECVATKENPQVYFCCCEGNFCNEKFSYFPQMEVTQP |
| | 114) with 1 additional aa at | TSNPVTPKPP |
| | N-terminus | |
| 1589 | N20Q mutant of Hybrid hu- | EAETRECIYYNANWELERTQQSGLERCEGEQDKRLHCYASWRNSSGTIELV |
| | ActRIIB-ECD (SEQ ID NO: | KKGCWLDDFNCYDRQECVATKENPQVYFCCCEGNFCNEKFSYFPQMEVTQ |
| | 114) with 2 additional aa at | PTSNPVTPKPP |
| | N-terminus | |
| 1590 | N21Q mutant of Hybrid hu- | GEAETRECIYYNANWELERTQQSGLERCEGEQDKRLHCYASWRNSSGTIEL |
| | ActRIIB-ECD (SEQ ID NO: | VKKGCWLDDFNCYDRQECVATKENPQVYFCCCEGNFCNEKFSYFPQMEVT |
| | 114) with 3 additional aa at | QPTSNPVTPKPP |
| | N-terminus | |
| 1591 | N22Q mutant of Hybrid hu- | RGEAETRECIYYNANWELERTQQSGLERCEGEQDKRLHCYASWRNSSGTIE |
| | ActRIIB-ECD (SEQ ID NO: | LVKKGCWLDDFNCYDRQECVATKENPQVYFCCCEGNFCNEKFSYFPQMEV |
| | 114) with 4 additional aa at | TQPTSNPVTPKPP |
| | N-terminus | |
| 1592 | N23Q mutant of Hybrid hu- | GRGEAETRECIYYNANWELERTQQSGLERCEGEQDKRLHCYASWRNSSGTI |
| | ActRIIB-ECD (SEQ ID NO: | ELVKKGCWLDDFNCYDRQECVATKENPQVYFCCCEGNFCNEKFSYFPQME |
| | 114) with 5 additional aa at | VTQPTSNPVTPKPP |
| | N-terminus | |
| 1593 | N24Q mutant of Hybrid hu- | SGRGEAETRECIYYNANWELERTQQSGLERCEGEQDKRLHCYASWRNSSGT |
| | ActRIIB-ECD (SEQ ID NO: | IELVKKGCWLDDFNCYDRQECVATKENPQVYFCCCEGNFCNEKFSYFPQME |
| | 114) with 6 additional aa at | VTQPTSNPVTPKPP |
| | N-terminus | |
| 1594 | N19Q mutant of Hybrid hu- | AETRECIYYNANWELERTQQSGLERCEGDQDKRLHCYASWRNSSGTIEIVK |
| | ActRIIB-ECD (SEQ ID NO: | KGCWLDDFNCYDRQECVAKKENPQVYFCCCEGNFCNEKFSYFPQMEVTQP |
| | 115) with 1 additional aa at | TSNPVTPKPP |
| | N-terminus | |
| 1595 | N20Q mutant of Hybrid hu- | EAETRECIYYNANWELERTQQSGLERCEGDQDKRLHCYASWRNSSGTIEIVK |
| | ActRIIB-ECD (SEQ ID NO: | KGCWLDDFNCYDRQECVAKKENPQVYFCCCEGNFCNEKFSYFPQMEVTQP |
| | 115) with 2 additional aa at | TSNPVTPKPP |
| | N-terminus | |
| 1596 | N21Q mutant of Hybrid hu- | GEAETRECIYYNANWELERTQQSGLERCEGDQDKRLHCYASWRNSSGTIEIV |
| | ActRIIB-ECD (SEQ ID NO: | KKGCWLDDFNCYDRQECVAKKENPQVYFCCCEGNFCNEKFSYFPQMEVTQ |
| | 115) with 3 additional aa at | PTSNPVTPKPP |
| | N-terminus | |
| 1597 | N22Q mutant of Hybrid hu- | RGEAETRECIYYNANWELERTQQSGLERCEGDQDKRLHCYASWRNSSGTIEI |
| | ActRIIB-ECD (SEQ ID NO: | VKKGCWLDDFNCYDRQECVAKKENPQVYFCCCEGNFCNEKFSYFPQMEVT |
| | 115) with 4 additional aa at | QPTSNPVTPKPP |
| | N-terminus | |
| 1598 | N23Q mutant of Hybrid hu- | GRGEAETRECIYYNANWELERTQQSGLERCEGDQDKRLHCYASWRNSSGTI |
| | ActRIIB-ECD (SEQ ID NO: | EIVKKGCWLDDFNCYDRQECVAKKENPQVYFCCCEGNFCNEKFSYFPQME |
| | 115) with 5 additional aa at | VTQPTSNPVTPKPP |
| | N-terminus | |
| 1599 | N24Q mutant of Hybrid hu- | SGRGEAETRECIYYNANWELERTQQSGLERCEGDQDKRLHCYASWRNSSGT |
| | ActRIIB-ECD (SEQ ID NO: | IEIVKKGCWLDDFNCYDRQECVAKKENPQVYFCCCEGNFCNEKFSYFPQME |
| | 115) with 6 additional aa at | VTQPTSNPVTPKPP |
| | N-terminus | |
| 1600 | N19Q mutant of Hybrid hu- | AETQECLFFNANWEKDRTQQTGVEPCYGDKDKRRHCFATWKNISGSIEIVK |
| | ActRIIB-ECD (SEQ ID NO: | QGCWLDDINCYDRTDCVEKKDSPEVYFCCCEGNMCNERFTHLPEAGGPEVT |
| | 116) with 1 additional aa at | YEPPPTAPT |
| | N-terminus | |
| 1601 | N20Q mutant of Hybrid hu- | EAETQECLFFNANWEKDRTQQTGVEPCYGDKDKRRHCFATWKNISGSIEIV |
| | ActRIIB-ECD (SEQ ID NO: | KQGCWLDDINCYDRTDCVEKKDSPEVYFCCCEGNMCNERFTHLPEAGGPEV |
| | 116) with 2 additional aa at | TYEPPPTAPT |
| | N-terminus | |
| 1602 | N21Q mutant of Hybrid hu- | GEAETQECLFFNANWEKDRTQQTGVEPCYGDKDKRRHCFATWKNISGSIEI |
| | ActRIIB-ECD (SEQ ID NO: | VKQGCWLDDINCYDRTDCVEKKDSPEVYFCCCEGNMCNERFTHLPEAGGPE |
| | 116) with 3 additional aa at | VTYEPPPTAPT |
| | N-terminus | |
| 1603 | N22Q mutant of Hybrid hu- | RGEAETQECLFFNANWEKDRTQQTGVEPCYGDKDKRRHCFATWKNISGSIEI |
| | ActRIIB-ECD (SEQ ID NO: | VKQGCWLDDINCYDRTDCVEKKDSPEVYFCCCEGNMCNERFTHLPEAGGPE |
| | 116) with 4 additional aa at | VTYEPPPTAPT |
| | N-terminus | |
| 1604 | N23Q mutant of Hybrid hu- | GRGEAETQECLFFNANWEKDRTQQTGVEPCYGDKDKRRHCFATWKNISGSI |
| | ActRIIB-ECD (SEQ ID NO: | EIVKQGCWLDDINCYDRTDCVEKKDSPEVYFCCCEGNMCNERFTHLPEAGG |
| | 116) with 5 additional aa at | PEVTYEPPPTAPT |
| | N-terminus | |
| 1605 | N24Q mutant of Hybrid hu- | SGRGEAETQECLFFNANWEKDRTQQTGVEPCYGDKDKRRHCFATWKNISGS |
| | ActRIIB-ECD (SEQ ID NO: | IEIVKQGCWLDDINCYDRTDCVEKKDSPEVYFCCCEGNMCNERFTHLPEAG |
| | 116) with 6 additional aa at | GPEVTYEPPPTAPT |
| | N-terminus | |
| 1606 | N19Q mutant of Hybrid hu- | AETRECIYYNANWELERTQQSGLERCYGDKDKRRHCYASWRNSSGTIELVK |
| | ActRIIB-ECD (SEQ ID NO: | KGCWLDDINCYDRQECVATKENPQVYFCCCEGNFCNERFTHLPEAGGPEVT |
| | 117) with 1 additional aa at | YEPPPTAPT |
| | N-terminus | |
| 1607 | N20Q mutant of Hybrid hu- | EAETRECIYYNANWELERTQQSGLERCYGDKDKRRHCYASWRNSSGTIELV |
| | ActRIIB-ECD (SEQ ID NO: | KKGCWLDDINCYDRQECVATKENPQVYFCCCEGNFCNERFTHLPEAGGPEV |
| | 117) with 2 additional aa at | TYEPPPTAPT |
| | N-terminus | |
| 1608 | N21Q mutant of Hybrid hu- | GEAETRECIYYNANWELERTQQSGLERCYGDKDKRRHCYASWRNSSGTIEL |
| | ActRIIB-ECD (SEQ ID NO: | VKKGCWLDDINCYDRQECVATKENPQVYFCCCEGNFCNERFTHLPEAGGPE |
| | 117) with 3 additional aa at | VTYEPPPTAPT |
| | N-terminus | |
| 1609 | N22Q mutant of Hybrid hu- | RGEAETRECIYYNANWELERTQQSGLERCYGDKDKRRHCYASWRNSSGTIE |
| | ActRIIB-ECD (SEQ ID NO: | LVKKGCWLDDINCYDRQECVATKENPQVYFCCCEGNFCNERFTHLPEAGGP |
| | 117) with 4 additional aa at | EVTYEPPPTAPT |
| | N-terminus | |
| 1610 | N23Q mutant of Hybrid hu- | GRGEAETRECIYYNANWELERTQQSGLERCYGDKDKRRHCYASWRNSSGTI |
| | ActRIIB-ECD (SEQ ID NO: | ELVKKGCWLDDINCYDRQECVATKENPQVYFCCCEGNFCNERFTHLPEAGG |
| | 117) with 5 additional aa at | PEVTYEPPPTAPT |
| | N-terminus | |
| 1611 | N24Q mutant of Hybrid hu- | SGRGEAETRECIYYNANWELERTQQSGLERCYGDKDKRRHCYASWRNSSG |
| | ActRIIB-ECD (SEQ ID NO: | TIELVKKGCWLDDINCYDRQECVATKENPQVYFCCCEGNFCNERFTHLPEA |
| | 117) with 6 additional aa at | GGPEVTYEPPPTAPT |
| | N-terminus | |
| 1613 | L55D mutant of SEQ ID | AETRECIYYNANWELERTNQSGLERCEGEQDKRLHCYASWRNSSGTIELVK |
| | NO: 1 (SEQ ID NO: 327) | KGCWDDDFNCYDRQECVATEENPQVYFCCCEGNFCNERFTHLPEAGGPEVT |
| | with 1 additional aa at N- | YEPPPTAPT |
| | terminus | |
| 1614 | L55D mutant of SEQ ID | EAETRECIYYNANWELERTNQSGLERCEGEQDKRLHCYASWRNSSGTIELV |
| | NO: 1 (SEQ ID NO: 327) | KKGCWDDDFNCYDRQECVATEENPQVYFCCCEGNFCNERFTHLPEAGGPE |
| | with 2 additional aa at N- | VTYEPPPTAPT |
| | terminus | |
| 1615 | L55D mutant of SEQ ID | GEAETRECIYYNANWELERTNQSGLERCEGEQDKRLHCYASWRNSSGTIEL |
| | NO: 1 (SEQ ID NO: 327) | VKKGCWDDDFNCYDRQECVATEENPQVYFCCCEGNFCNERFTHLPEAGGP |
| | with 3 additional aa at N- | EVTYEPPPTAPT |
| | terminus | |
| 1616 | L55D mutant of SEQ ID | RGEAETRECIYYNANWELERTNQSGLERCEGEQDKRLHCYASWRNSSGTIE |
| | NO: 1 (SEQ ID NO: 327) | LVKKGCWDDDFNCYDRQECVATEENPQVYFCCCEGNFCNERFTHLPEAGG |
| | with 4 additional aa at N- | PEVTYEPPPTAPT |
| | terminus | |
| 1617 | L55D mutant of SEQ ID | GRGEAETRECIYYNANWELERTNQSGLERCEGEQDKRLHCYASWRNSSGTI |
| | NO: 1 (SEQ ID NO: 327) | ELVKKGCWDDDFNCYDRQECVATEENPQVYFCCCEGNFCNERFTHLPEAG |
| | with 5 additional aa at N- | GPEVTYEPPPTAPT |
| | terminus | |
| 1618 | L55D mutant of SEQ ID | SGRGEAETRECIYYNANWELERTNQSGLERCEGEQDKRLHCYASWRNSSGT |
| | NO: 1 (SEQ ID NO: 327) | IELVKKGCWDDDFNCYDRQECVATEENPQVYFCCCEGNFCNERFTHLPEAG |
| | with 6 additional aa at N- | GPEVTYEPPPTAPT |
| | terminus | |
| 1619 | N19Q mutant of SEQ ID | AETRECIYYNANWELERTQQSGLERCEGEQDKRLHCYASWRNSSGTIELVK |
| | NO: 327 with 1 additional aa | KGCWDDDFNCYDRQECVATEENPQVYFCCCEGNFCNERFTHLPEAGGPEVT |
| | at N-terminus | YEPPPTAPT |
| 1620 | N20Q mutant of SEQ ID | EAETRECIYYNANWELERTQQSGLERCEGEQDKRLHCYASWRNSSGTIELV |
| | NO: 327 with 2 additional aa | KKGCWDDDFNCYDRQECVATEENPQVYFCCCEGNFCNERFTHLPEAGGPE |
| | at N-terminus | VTYEPPPTAPT |
| 1621 | N21Q mutant of SEQ ID | GEAETRECIYYNANWELERTQQSGLERCEGEQDKRLHCYASWRNSSGTIEL |
| | NO: 327 with 3 additional aa | VKKGCWDDDFNCYDRQECVATEENPQVYFCCCEGNFCNERFTHLPEAGGP |
| | at N-terminus | EVTYEPPPTAPT |
| 1622 | N22Q mutant of SEQ ID | RGEAETRECIYYNANWELERTQQSGLERCEGEQDKRLHCYASWRNSSGTIE |
| | NO: 327 with 4 additional aa | LVKKGCWDDDFNCYDRQECVATEENPQVYFCCCEGNFCNERFTHLPEAGG |
| | at N-terminus | PEVTYEPPPTAPT |
| 1623 | N23Q mutant of SEQ ID | GRGEAETRECIYYNANWELERTQQSGLERCEGEQDKRLHCYASWRNSSGTI |
| | NO: 327 with 5 additional aa | ELVKKGCWDDDFNCYDRQECVATEENPQVYFCCCEGNFCNERFTHLPEAG |
| | at N-terminus | GPEVTYEPPPTAPT |
| 1624 | N24Q mutant of SEQ ID | SGRGEAETRECIYYNANWELERTQQSGLERCEGEQDKRLHCYASWRNSSGT |
| | NO: 327 with 6 additional aa | IELVKKGCWDDDFNCYDRQECVATEENPQVYFCCCEGNFCNERFTHLPEAG |
| | at N-terminus | GPEVTYEPPPTAPT |
| 1626 | L55E mutant of SEQ ID NO: | AETRECIYYNANWELERTNQSGLERCEGEQDKRLHCYASWRNSSGTIELVK |
| | 1 (SEQ ID NO: 330) with 1 | KGCWEDDFNCYDRQECVATEENPQVYFCCCEGNFCNERFTHLPEAGGPEVT |
| | additional aa at N-terminus | YEPPPTAPT |
| 1627 | L55E mutant of SEQ ID NO: | EAETRECIYYNANWELERTNQSGLERCEGEQDKRLHCYASWRNSSGTIELV |
| | 1 (SEQ ID NO: 330) with 2 | KKGCWEDDFNCYDRQECVATEENPQVYFCCCEGNFCNERFTHLPEAGGPEV |
| | additional aa at N-terminus | TYEPPPTAPT |
| 1628 | L55E mutant of SEQ ID NO: | GEAETRECIYYNANWELERTNQSGLERCEGEQDKRLHCYASWRNSSGTIEL |
| | 1 (SEQ ID NO: 330) with 3 | VKKGCWEDDFNCYDRQECVATEENPQVYFCCCEGNFCNERFTHLPEAGGPE |
| | additional aa at N-terminus | VTYEPPPTAPT |
| 1629 | L55E mutant of SEQ ID NO: | RGEAETRECIYYNANWELERTNQSGLERCEGEQDKRLHCYASWRNSSGTIE |
| | 1 (SEQ ID NO: 330) with 4 | LVKKGCWEDDFNCYDRQECVATEENPQVYFCCCEGNFCNERFTHLPEAGGP |
| | additional aa at N-terminus | EVTYEPPPTAPT |
| 1630 | L55E mutant of SEQ ID NO: | GRGEAETRECIYYNANWELERTNQSGLERCEGEQDKRLHCYASWRNSSGTI |
| | 1 (SEQ ID NO: 330) with 5 | ELVKKGCWEDDFNCYDRQECVATEENPQVYFCCCEGNFCNERFTHLPEAGG |
| | additional aa at N-terminus | PEVTYEPPPTAPT |
| 1631 | L55E mutant of SEQ ID NO: | SGRGEAETRECIYYNANWELERTNQSGLERCEGEQDKRLHCYASWRNSSGT |
| | 1 (SEQ ID NO: 330) with 6 | IELVKKGCWEDDFNCYDRQECVATEENPQVYFCCCEGNFCNERFTHLPEAG |
| | additional aa at N-terminus | GPEVTYEPPPTAPT |
| 1632 | N19Q mutant of SEQ ID | AETRECIYYNANWELERTQQSGLERCEGEQDKRLHCYASWRNSSGTIELVK |
| | NO: 330 with 1 additional aa | KGCWEDDFNCYDRQECVATEENPQVYFCCCEGNFCNERFTHLPEAGGPEVT |
| | at N-terminus | YEPPPTAPT |
| 1633 | N20Q mutant of SEQ ID | EAETRECIYYNANWELERTQQSGLERCEGEQDKRLHCYASWRNSSGTIELV |
| | NO: 330 with 2 additional aa | KKGCWEDDFNCYDRQECVATEENPQVYFCCCEGNFCNERFTHLPEAGGPEV |
| | at N-terminus | TYEPPPTAPT |
| 1634 | N21Q mutant of SEQ ID | GEAETRECIYYNANWELERTQQSGLERCEGEQDKRLHCYASWRNSSGTIEL |
| | NO: 330 with 3 additional aa | VKKGCWEDDFNCYDRQECVATEENPQVYFCCCEGNFCNERFTHLPEAGGPE |
| | at N-terminus | VTYEPPPTAPT |
| 1635 | N22Q mutant of SEQ ID | RGEAETRECIYYNANWELERTQQSGLERCEGEQDKRLHCYASWRNSSGTIE |
| | NO: 330 with 4 additional aa | LVKKGCWEDDFNCYDRQECVATEENPQVYFCCCEGNFCNERFTHLPEAGGP |
| | at N-terminus | EVTYEPPPTAPT |
| 1636 | N23Q mutant of SEQ ID | GRGEAETRECIYYNANWELERTQQSGLERCEGEQDKRLHCYASWRNSSGTI |
| | NO: 330 with 5 additional aa | ELVKKGCWEDDFNCYDRQECVATEENPQVYFCCCEGNFCNERFTHLPEAGG |
| | at N-terminus | PEVTYEPPPTAPT |
| 1637 | N24Q mutant of SEQ ID | SGRGEAETRECIYYNANWELERTQQSGLERCEGEQDKRLHCYASWRNSSGT |
| | NO: 330 with 6 additional aa | IELVKKGCWEDDFNCYDRQECVATEENPQVYFCCCEGNFCNERFTHLPEAG |
| | at N-terminus | GPEVTYEPPPTAPT |
| 1639 | R40A mutant of SEQ ID | AETRECIYYNANWELERTNQSGLERCEGEQDKRLHCYASWANSSGTIELVK |
| | NO: 1 (SEQ ID NO: 333) | KGCWLDDFNCYDRQECVATEENPQVYFCCCEGNFCNERFTHLPEAGGPEVT |
| | with 1 additional aa at N- | YEPPPTAPT |
| | terminus | |
| 1640 | R40A mutant of SEQ ID | EAETRECIYYNANWELERTNQSGLERCEGEQDKRLHCYASWANSSGTIELV |
| | NO: 1 (SEQ ID NO: 333) | KKGCWLDDFNCYDRQECVATEENPQVYFCCCEGNFCNERFTHLPEAGGPEV |
| | with 2 additional aa at N- | TYEPPPTAPT |
| | terminus | |
| 1641 | R40A mutant of SEQ ID | GEAETRECIYYNANWELERTNQSGLERCEGEQDKRLHCYASWANSSGTIEL |
| | NO: 1 (SEQ ID NO: 333) | VKKGCWLDDFNCYDRQECVATEENPQVYFCCCEGNFCNERFTHLPEAGGPE |
| | with 3 additional aa at N- | VTYEPPPTAPT |
| | terminus | |
| 1642 | R40A mutant of SEQ ID | RGEAETRECIYYNANWELERTNQSGLERCEGEQDKRLHCYASWANSSGTIE |
| | NO: 1 (SEQ ID NO: 333) | LVKKGCWLDDFNCYDRQECVATEENPQVYFCCCEGNFCNERFTHLPEAGGP |
| | with 4 additional aa at N- | EVTYEPPPTAPT |
| | terminus | |
| 1643 | R40A mutant of SEQ ID | GRGEAETRECIYYNANWELERTNQSGLERCEGEQDKRLHCYASWANSSGTI |
| | NO: 1 (SEQ ID NO: 333) | ELVKKGCWLDDFNCYDRQECVATEENPQVYFCCCEGNFCNERFTHLPEAGG |
| | with 5 additional aa at N- | PEVTYEPPPTAPT |
| | terminus | |
| 1644 | R40A mutant of SEQ ID | SGRGEAETRECIYYNANWELERTNQSGLERCEGEQDKRLHCYASWANSSGT |
| | NO: 1 (SEQ ID NO: 333) | IELVKKGCWLDDFNCYDRQECVATEENPQVYFCCCEGNFCNERFTHLPEAG |
| | with 6 additional aa at N- | GPEVTYEPPPTAPT |
| | terminus | |
| 1645 | N19Q mutant of SEQ ID | AETRECIYYNANWELERTQQSGLERCEGEQDKRLHCYASWANSSGTIELVK |
| | NO: 333 with 1 additional aa | KGCWLDDFNCYDRQECVATEENPQVYFCCCEGNFCNERFTHLPEAGGPEVT |
| | at N-terminus | YEPPPTAPT |
| 1646 | N19Q mutant of SEQ ID | EAETRECIYYNANWELERTQQSGLERCEGEQDKRLHCYASWANSSGTIELV |
| | NO: 333 with 2 additional aa | KKGCWLDDFNCYDRQECVATEENPQVYFCCCEGNFCNERFTHLPEAGGPEV |
| | at N-terminus | TYEPPPTAPT |
| 1647 | N19Q mutant of SEQ ID | GEAETRECIYYNANWELERTQQSGLERCEGEQDKRLHCYASWANSSGTIEL |
| | NO: 333 with 3 additional aa | VKKGCWLDDFNCYDRQECVATEENPQVYFCCCEGNFCNERFTHLPEAGGPE |
| | at N-terminus | VTYEPPPTAPT |
| 1648 | N19Q mutant of SEQ ID | RGEAETRECIYYNANWELERTQQSGLERCEGEQDKRLHCYASWANSSGTIE |
| | NO: 333 with 4 additional aa | LVKKGCWLDDFNCYDRQECVATEENPQVYFCCCEGNFCNERFTHLPEAGGP |
| | at N-terminus | EVTYEPPPTAPT |
| 1649 | N19Q mutant of SEQ ID | GRGEAETRECIYYNANWELERTQQSGLERCEGEQDKRLHCYASWANSSGTI |
| | NO: 333 with 5 additional aa | ELVKKGCWLDDFNCYDRQECVATEENPQVYFCCCEGNFCNERFTHLPEAGG |
| | at N-terminus | PEVTYEPPPTAPT |
| 1650 | N19Q mutant of SEQ ID | SGRGEAETRECIYYNANWELERTQQSGLERCEGEQDKRLHCYASWANSSGT |
| | NO: 333 with 6 additional aa | IELVKKGCWLDDFNCYDRQECVATEENPQVYFCCCEGNFCNERFTHLPEAG |
| | at N-terminus | GPEVTYEPPPTAPT |

[0298] Various modifications and variations of the described methods, compositions, and kits of the invention will be apparent to those skilled in the art without departing from the scope and spirit of the invention. Although the invention has been described in connection with specific embodiments, it will be understood that it is capable of further modifications and that the invention as claimed should not be unduly limited to such specific embodiments. Indeed, various modifications of the described modes for carrying out the invention that are obvious to those skilled in the art are intended to be within the scope of the invention. This application is intended to cover any variations, uses, or adaptations of the invention following, in general, the principles of the invention and including such departures from the present disclosure come within known customary practice within the art to which the invention pertains and may be applied to the essential features herein before set forth.

[0299] All publications, published patent documents, and patent applications cited herein are hereby incorporated by reference to the same extent as though each individual publication, published patent document, or patent application was specifically and individually indicated as being incorporated by reference.

The application's sequence listing, which the Patent Office published only in electronic form, follows.

SEQUENCE LISTING (1666 sequences)

SEQ ID NO: 1 - protein, 110 aa, synthetic construct
ETRECIYYNANWELERTNQSGLERCEGEQDKRLHCYASWRNSSGTIELVKKGCWLDDFNCYDRQECVATEENPQVYFCCCEGNFCNERFTHLPEAGGPEVTYEPPPTAPT

SEQ ID NO: 2 - protein, 110 aa, synthetic construct
ETQECLFFNANWEKDRTNQTGVEPCYGDKDKRRHCFATWKNISGSIEIVKQGCWLDDINCYDRTDCVEKKDSPEVYFCCCEGNMCNEKFSYFPEMEVTQPTSNPVTPKPP

SEQ ID NO: 3 - protein, 110 aa, synthetic construct
ETRECIYYNANWELERTNQSGLERCYGDKDKRRHCYASWRNSSGTIELVKKGCWLDDINCYDRTDCVEKKDSPEVYFCCCEGNFCNERFTHLPEAGGPEVTYEPPPTAPT

SEQ ID NO: 4 - protein, 110 aa, synthetic construct
ETRECIYYNANWELERTNQSGLERCYGDKDKRRHCYASWRNSSGTIELVKKGCWLDDFNCYDRTDCVEKKDSPEVYFCCCEGNFCNERFTHLPEAGGPEVTYEPPPTAPT

SEQ ID NO: 5 - protein, 110 aa, synthetic construct
ETRECIYYNANWELERTNQSGLERCEGEQDKRLHCYASWRNSSGTIELVKKGCWLDDINCYDRTDCVEKKDSPEVYFCCCEGNFCNERFTHLPEAGGPEVTYEPPPTAPT

SEQ ID NO: 6 - protein, 110 aa, synthetic construct
ETRECIYYNANWELERTNQSGLERCEGEQDKRLHCYASWRNSSGTIELVKKGCWLDDINCYDRTDCVEKKDSPQVYFCCCEGNFCNERFTHLPEAGGPEVTYEPPPTAPT

SEQ ID NO: 7 - protein, 110 aa, synthetic construct
ETRECIYYNANWELERTNQSGLERCEGEQDKRLHCYASWRNSSGTIELVKKGCWLDDFNCYDRTDCVEKKDSPQVYFCCCEGNFCNERFTHLPEAGGPEVTYEPPPTAPT

SEQ ID NO: 8 - protein, 110 aa, synthetic construct
ETRECIYYNANWELERTNQSGLERCEGEQDKRLHCYASWRNSSGTIELVKKGCWLDDFNCYDRTDCVEKKDSPEVYFCCCEGNFCNERFTHLPEAGGPEVTYEPPPTAPT

SEQ ID NO: 9 - protein, 110 aa, synthetic construct
ETRECIYYNANWELERTNQSGLERCEGEQDKRLHCYASWRNSSGTIELVKKGCWLDDFNCYDRQECVEKKDSPEVYFCCCEGNFCNERFTHLPEAGGPEVTYEPPPTAPT

SEQ ID NO: 10 - protein, 110 aa, synthetic construct
ETRECIYYNANWELERTNQSGLERCEGEQDKRLHCYASWRNSSGTIELVKKGCWLDDFNCYDRQECVEKKDSPQVYFCCCEGNFCNERFTHLPEAGGPEVTYEPPPTAPT

SEQ ID NO: 11 - protein, 109 aa, synthetic construct
TRECIYYNANWELERTNQSGLERCEGEQDKRLHCYASWRNSSGTIELVKKGCWLDDINCYDRQECVEKKDSPEVYFCCCEGNFCNERFTHLPEAGGPEVTYEPPPTAPT

SEQ ID NO: 12 - protein, 110 aa, synthetic construct
ETRECIYYNANWELERTNQSGLERCEGEQDKRLHCYASWRNSSGTIELVKKGCWLDDFNCYDRTDCVEKKDSPEVYFCCCEGNMCNERFTHLPEAGGPEVTYEPPPTAPT

SEQ ID NO: 13 - protein, 110 aa, synthetic construct
ETRECIYYNANWELERTNQSGLERCEGDQDKRLHCYASWRNSSGTIELVKKGCWLDDFNCYDRQECVEKKDSPEVYFCCCEGNMCNERFTHLPEAGGPEVTYEPPPTAPT

SEQ ID NO: 14 - protein, 110 aa, synthetic construct
ETQECIYYNANWEKDRTNQTGVEPCYGDKDKRRHCYASWRNSSGTIELVKKGCWLDDFNCYDRQECVATEENPQVYFCCCEGNFCNERFTHLPEAGGPEVTYEPPPTAPT

SEQ ID NO: 15 - protein, 110 aa, synthetic construct
ETQECIYYNANWEKDRTNQTGVEPCEGDQDKRLHCYASWRNSSGTIELVKKGCWLDDFNCYDRQECVATEENPQVYFCCCEGNFCNERFTHLPEAGGPEVTYEPPPTAPT

SEQ ID NO: 16 - protein, 110 aa, synthetic construct
ETRECIYYNANWELERTNQSGLERCYGDKDKRRHCYASWRNSSGTIELVKKGCWLDDFNCYDRQECVATEENPQVYFCCCEGNFCNERFTHLPEAGGPEVTYEPPPTAPT

SEQ ID NO: 17 - protein, 110 aa, synthetic construct
ETRECIYYNANWEKDRTNQTGVEPCEGDQDKRLHCYASWRNSSGTIELVKKGCWLDDFNCYDRQECVATEENPQVYFCCCEGNFCNERFTHLPEAGGPEVTYEPPPTAPT

SEQ ID NO: 18 - protein, 110 aa, synthetic construct; identical to SEQ ID NO: 15

SEQ ID NO: 19 - protein, 110 aa, synthetic construct
ETQECIYYNANWEKDRTNQTGLERCEGEQDKRLHCYASWRNSSGTIELVKKGCWLDDFNCYDRQECVATEENPQVYFCCCEGNFCNERFTHLPEAGGPEVTYEPPPTAPT

SEQ ID NO: 20 - protein, 110 aa, synthetic construct
ETQECIYYNANWEKDRTNQSGLERCEGEQDKRLHCYASWRNSSGTIELVKKGCWLDDFNCYDRQECVATEENPQVYFCCCEGNFCNERFTHLPEAGGPEVTYEPPPTAPT

SEQ ID NO: 21 - protein, 110 aa, synthetic construct
ETRECIYYNANWEKDRTNQSGLERCEGEQDKRLHCYASWRNSSGTIELVKKGCWLDDFNCYDRQECVATEENPQVYFCCCEGNFCNERFTHLPEAGGPEVTYEPPPTAPT

SEQ ID NO: 22 - protein, 110 aa, synthetic construct
ETQECIYYNANWELERTNQSGLERCEGEQDKRLHCYASWRNSSGTIELVKKGCWLDDFNCYDRQECVATEENPQVYFCCCEGNFCNERFTHLPEAGGPEVTYEPPPTAPT

SEQ ID NO: 23 - protein, 110 aa, synthetic construct
ETRECIYYNANWELERTNQSGLERCEGEQDKRLHCFATWRNSSGTIELVKQGCWLDDFNCYDRQECVATEENPQVYFCCCEGNFCNERFTHLPEAGGPEVTYEPPPTAPT

SEQ ID NO: 24 - protein, 110 aa, synthetic construct
ETRECIYYNANWELERTNQSGLERCYGDKDKRRHCYASWRNSSGTIELVKKGCWLDDINCYDRQECVATEENPQVYFCCCEGNFCNERFTHLPEAGGPEVTYEPPPTAPT

SEQ ID NO: 25 - protein, 110 aa, synthetic construct
ETRECIYYNANWELERTNQSGLERCEGEQDKRLHCYASWRNSSGTIELVKKGCWLDDFNCYDRQECVATKENPQVYFCCCEGNFCNERFTHLPEAGGPEVTYEPPPTAPT

SEQ ID NO: 26 - protein, 110 aa, synthetic construct
ETRECIYYNANWELERTNQSGLERCEGEQDKRLHCYASWRNSSGTIELVKKGCWLDDINCYDRQECVATEENPQVYFCCCEGNFCNERFTHLPEAGGPEVTYEPPPTAPT

SEQ ID NO: 27 - protein, 110 aa, synthetic construct
ETRECIYYNANWELERTNQSGLERCEGEQDKRLHCYASWRNSSGTIELVKKGCWLDDINCYDRQECVATKENPQVYFCCCEGNFCNERFTHLPEAGGPEVTYEPPPTAPT

SEQ ID NO: 28 - protein, 110 aa, synthetic construct
ETRECIYYNANWELERTNQSGLERCEGDKDKRLHCYASWRNSSGTIELVKKGCWLDDINCYDRQECVATKENPQVYFCCCEGNFCNERFTHLPEAGGPEVTYEPPPTAPT

SEQ ID NO: 29 - protein, 110 aa, synthetic construct
ETRECIYYNANWELERTNQSGLERCEGDQDKRLHCYASWRNSSGTIELVKKGCWLDDINCYDRQECVATKENPQVYFCCCEGNFCNERFTHLPEAGGPEVTYEPPPTAPT

SEQ ID NO: 30 - protein, 110 aa, synthetic construct
ETRECIYYNANWELERTNQSGLERCEGDQDKRLHCYASWRNSSGTIELVKKGCWLDDFNCYDRQECVATKENPQVYFCCCEGNFCNERFTHLPEAGGPEVTYEPPPTAPT

SEQ ID NO: 31 - protein, 110 aa, synthetic construct
ETRECIYYNANWELERTNQSGLERCEGDQDKRLHCYASWRNSSGTIELVKKGCWLDDFNCYDRQECVATEENPQVYFCCCEGNFCNERFTHLPEAGGPEVTYEPPPTAPT

SEQ ID NO: 32 - protein, 110 aa, synthetic construct
ETRECIYYNANWELERTNQSGLERCYGDKDKRRHCYASWRNSSGTIELVKKGCWLDDINCYDRQECVEKKDSPEVYFCCCEGNFCNERFTHLPEAGGPEVTYEPPPTAPT

SEQ ID NO: 33 - protein, 110 aa, synthetic construct
ETRECIFFNANWEKDRTNQTGVEPCEGEQDKRLHCYASWRNSSGTIELVKKGCWLDDFNCYDRQECVATEENPQVYFCCCEGNFCNERFTHLPEAGGPEVTYEPPPTAPT

SEQ ID NO: 34 - protein, 110 aa, synthetic construct
ETRECIYYNANWELERTNQSGLERCEGEQDKRLHCFATWKNISGSIELVKQGCWLDDFNCYDRQECVATEENPQVYFCCCEGNFCNERFTHLPEAGGPEVTYEPPPTAPT

SEQ ID NO: 35 - protein, 110 aa, synthetic construct
ETRECIYYNANWELERTNQSGLERCEGEQDKRLHCYASWRNSSGTIELVKKGCWLDDFNCYDRTDCVATEENPQVYFCCCEGNFCNERFTHLPEAGGPEVTYEPPPTAPT

SEQ ID NO: 36 - protein, 110 aa, synthetic construct
ETRECIYYNANWELERTNQSGLERCEGEQDKRLHCYASWRNSSGTIELVKKGCWLDDFNCYDRQECVATEENPQVYFCCCEGNMCNERFTHLPEAGGPEVTYEPPPTAPT

SEQ ID NO: 37 - protein, 110 aa, synthetic construct
ETRECIYYNANWELERTNQSGLERCEGDQDKRLHCYASWRNSSGTIELVKKGCWLDDINCYDRQECVATEENPQVYFCCCEGNFCNERFTHLPEAGGPEVTYEPPPTAPT

SEQ ID NO: 38 - protein, 330 aa, synthetic construct [sequence omitted]

SEQ ID NO: 39 - protein, 207 aa, synthetic construct
VFLFPPKPKDTLMISRTPEVTCVVVDVSHEDPEVKFNWYVDGVEVHNAKTKPREEQYNSTYRVVSVLTVLHQDWLNGKEYKCKVSNKALPAPIEKTISKAKGQPREPQVYTLPPSRDELTKNQVSLTCLVKGFYPSDIAVEWESNGQPENNYKTTPPVLDSDGSFFLYSKLTVDKSRWQQGNVFSCSVMHEALHNHYTQKSLSLSPG

SEQ ID NO: 40 - protein, 326 aa, synthetic construct
ASTKGPSVFPLAPCSRSTSESTAALGCLVKDYFPEPVTVSWNSGALTSGVHTFPAVLQSSGLYSLSSVVTVPSSNFGTQTYTCNVDHKPSNTKVDKTVERKCCVECPPCPAPPVAGPSVFLFPPKPKDTLMISRTPEVTCVVVDVSHEDPEVQFNWYVDGVEVHNAKTKPREEQFNSTFRVVSVLTVVHQDWLNGKEYKCKVSNKGLPAPIEKTISKTKGQPREPQVYTLPPSREEMTKNQVSLTCLVKGFYPSDIAVEWESNGQPENNYKTTPPMLDSDGSFFLYSKLTVDKSRWQQGNVFSCSVMHEALHNHYTQKSLSLSPGK

SEQ ID NO: 41 - protein, 206 aa, synthetic construct
VFLFPPKPKDTLMISRTPEVTCVVVDVSHEDPEVQFNWYVDGVEVHNAKTKPREEQFNSTFRVVSVLTVVHQDWLNGKEYKCKVSNKGLPAPIEKTISKTKGQPREPQVYTLPPSREEMTKNQVSLTCLVKGFYPSDIAVEWESNGQPENNYKTTPPMLDSDGSFFLYSKLTVDKSRWQQGNVFCSVMHEALHNHYTQKSLSLSPG

SEQ ID NO: 42 - protein, 327 aa, synthetic construct
ASTKGPSVFPLAPCSRSTSESTAALGCLVKDYFPEPVTVSWNSGALTSGVHTFPAVLQSSGLYSLSSVVTVPSSSLGTKTYTCNVDHKPSNTKVDKRVESKYGPPCPSCPAPEFLGGPSVFLFPPKPKDTLMISRTPEVTCVVVDVSQEDPEVQFNWYVDGVEVHNAKTKPREEQFNSTYRVVSVLTVLHQDWLNGKEYKCKVSNKGLPSSIEKTISKAKGQPREPQVYTLPPSQEEMTKNQVSLTCLVKGFYPSDIAVEWESNGQPENNYKTTPPVLDSDGSFFLYSRLTVDKSRWQEGNVFSCSVMHEALHNHYTQKSLSLSLGK

SEQ ID NO: 43 - protein, 216 aa, synthetic construct
APEFLGGPSVFLFPPKPKDTLMISRTPEVTCVVVDVSQEDPEVQFNWYVDGVEVHNAKTKPREEQFNSTYRVVSVLTVLHQDWLNGKEYKCKVSNKGLPSSIEKTISKAKGQPREPQVYTLPPSQEEMTKNQVSLTCLVKGFYPSDIAVEWESNGQPENNYKTTPPVLDSDGSFFLYSRLTVDKSRWQEGNVFSCSVMHEALHNHYTQKSLSLSLG

SEQ ID NO: 44 - protein, 5 aa, synthetic construct
GGGGS

SEQ ID NO: 45 - protein, 512 aa, synthetic construct
MTAPWVALALLWGSLCAGSGRGEAETRECIYYNANWELERTNQSGLERCEGEQDKRLHCYASWRNSSGTIELVKKGCWLDDFNCYDRQECVATEENPQVYFCCCEGNFCNERFTHLPEAGGPEVTYEPPPTAPTLLTVLAYSLLPIGGLSLIVLLAFWMYRHRKPPYGHVDIHEDPGPPPPSPLVGLKPLQLLEIKARGRFGCVWKAQLMNDFVAVKIFPLQDKQSWQSEREIFSTPGMKHENLLQFIAAEKRGSNLEVELWLITAFHDKGSLTDYLKGNIITWNELCHVAETMSRGLSYLHEDVPWCRGEGHKPSIAHRDFKSKNVLLKSDLTAVLADFGLAVRFEPGKPPGDTHGQVGTRRYMAPEVLEGAINFQRDAFLRIDMYAMGLVLWELVSRCKAADGPVDEYMLPFEEEIGQHPSLEELQEVVVHKKMRPTIKDHWLKHPGLAQLCVTIEECWDHDAEARLSAGCVEERVSLIRRSVNGTTSDCLVSLVTSVTNVDLPPKESSI

SEQ ID NO: 46 - protein, 116 aa, synthetic construct
SGRGEAETRECIYYNANWELERTNQSGLERCEGEQDKRLHCYASWRNSSGTIELVKKGCWLDDFNCYDRQECVATEENPQVYFCCCEGNFCNERFTHLPEAGGPEVTYEPPPTAPT

SEQ ID NO: 47 - protein, 513 aa, synthetic construct
MGAATKLAFAVFLISCSSGAILGRSETQECIYYNANWEKDKTNRSGIEPCYGDKDKRRHCFATWKNISGSIEIVKQGCWLDDINCYDRNDCIEKKDSPEVFFCCCEGNMCNERFFYFPEMEVTQPTSNPVTPKPPLFNTLLYSLVPIMGIAVIVLFSFWMYRHHKLAYPPVLVPTQDPGPPPPSPLMGLKPLQLLEIKARGRFGCVWKAQLLNEYVAVKIFPIQDKQSWQNEYEIYSLPGMKHDNILQFIGAEKRGTSIDVDLWLITAFHEKGSLTDFLKANVVSWNELCHIAQTMARGLAYLHEDIPGLKDGHKPAISHRDIKSKNVLLKNNLTACIADFGLALKFEAGKSAGDTHGQVGTRRYMAPEVLEGAINFQRDAFLRIDMYAMGLVLWELASRCTASDGPVDEYMLPFEEEIGQHPSLEDMQEVVVHKKKRPVLRECWQKHSGMAMLCETIEECWDHDAEARLSAGCVEERIIQMQKLTNIITTEDIVTVVTMVTNVDFPPKESSL

SEQ ID NO: 48 - protein, 116 aa, synthetic construct
AILGRSETQECLFFNANWEKDRTNQTGVEPCYGDKDKRRHCFATWKNISGSIEIVKQGCWLDDINCYDRTDCVEKKDSPEVYFCCCEGNMCNEKFSYFPEMEVTQPTSNPVTPKPP

SEQ ID NO: 49 - protein, 18 aa, synthetic construct
MTAPWVALALLWGSLCAG

SEQ ID NO: 50 - protein, 22 aa, synthetic construct
MDMRVPAQLLGLLLLWLRGARC

SEQ ID NO: 51 - protein, 110 aa, synthetic construct
ETQECLFFNANWEKDRTNQSGVEPCYGDKDKRRHCYASWRNSSGTIELVKKGCWLDDFNCYDRQECVATEENPQVYFCCCEGNFCNERFTHLPEAGGPEVTYEPPPTAPT

SEQ ID NO: 52 - protein, 110 aa, synthetic construct
ETQECLFFNANWEKDRTNQSGVEPCEGEQDKRLHCYASWRNSSGTIELVKKGCWLDDFNCYDRQECVATEENPQVYFCCCEGNFCNERFTHLPEAGGPEVTYEPPPTAPT

SEQ ID NO: 53 - protein, 110 aa, synthetic construct
ETRECLFFNANWEKDRTNQSGVEPCEGEQDKRLHCYASWRNSSGTIELVKKGCWLDDFNCYDRQECVATEENPQVYFCCCEGNFCNERFTHLPEAGGPEVTYEPPPTAPT

SEQ ID NO: 54 - protein, 110 aa, synthetic construct
ETQECLFFNANWEKDRTNQSGVEPCYGEQDKRLHCYASWRNSSGTIELVKKGCWLDDFNCYDRQECVATEENPQVYFCCCEGNFCNERFTHLPEAGGPEVTYEPPPTAPT

SEQ ID NO: 55 - protein, 110 aa, synthetic construct
ETRECLFFNANWEKDRTNQSGVEPCYGDKDKRRHCYASWRNSSGTIELVKKGCWLDDFNCYDRQECVATEENPQVYFCCCEGNFCNERFTHLPEAGGPEVTYEPPPTAPT

SEQ ID NO: 56 - protein, 110 aa, synthetic construct
ETRECLFFNANWEKDRTNQTGVEPCYGDKDKRRHCFATWKNISGSIEIVKQGCWLDDFNCYDRQECVATEENPQVYFCCCEGNFCNERFTHLPEAGGPEVTYEPPPTAPT

SEQ ID NO: 57 - protein, 110 aa, synthetic construct
ETRECLFFNANWEKDRTNQTGVEPCYGDKDKRRHCFATWKNISGSIEIVKQGCWLDDINCYDRQECVATEENPQVYFCCCEGNFCNERFTHLPEAGGPEVTYEPPPTAPT

SEQ ID NO: 58 - protein, 110 aa, synthetic construct
ETRECLFFNANWEKDRTNQTGVEPCYGDKDKRRHCFATWKNISGSIEIVKQGCWLDDINCYDRTDCVEKKDSPEVYFCCCEGNFCNERFTHLPEAGGPEVTYEPPPTAPT

SEQ ID NO: 59 - protein, 110 aa, synthetic construct
ETQECIYYNANWELERTNQSGLERCYGDKDKRRHCFATWKNISGSIEIVKQGCWLDDINCYDRQECVATEENPQVYFCCCEGNFCNERFTHLPEAGGPEVTYEPPPTAPT

SEQ ID NO: 60 - protein, 110 aa, synthetic construct
ETRECIYYNANWELERTNQSGLERCYGDKDKRRHCFATWKNISGSIEIVKQGCWLDDINCYDRTDCVEKKDSPEVYFCCCEGNFCNERFTHLPEAGGPEVTYEPPPTAPT

SEQ ID NO: 61 - protein, 110 aa, synthetic construct
ETRECIYYNANWELERTNQSGLERCYGDKDKRRHCFATWKNISGSIEIVKQGCWLDDINCYDRTDCVEKKDSPEVYFCCCEGNMCNERFTHLPEAGGPEVTYEPPPTAPT

SEQ ID NO: 62 - protein, 110 aa, synthetic construct
ETRECIYYNANWELERTNQSGLERCEGEQDKRLHCFATWKNISGSIEIVKQGCWLDDINCYDRTDCVEKKDSPEVYFCCCEGNFCNERFTHLPEAGGPEVTYEPPPTAPT

SEQ ID NO: 63 - protein, 110 aa, synthetic construct
ETRECIYYNANWELERTNQSGLERCEGEQDKRLHCFATWKNISGSIEIVKQGCWLDDINCYDRTDCVATEENPQVYFCCCEGNFCNERFTHLPEAGGPEVTYEPPPTAPT

SEQ ID NO: 64 - protein, 110 aa, synthetic construct
ETRECIYYNANWELERTNQSGLERCEGEQDKRLHCFATWKNISGSIEIVKQGCWLDDFNCYDRTDCVATEENPQVYFCCCEGNFCNERFTHLPEAGGPEVTYEPPPTAPT

SEQ ID NO: 65 - protein, 110 aa, synthetic construct
ETRECIYYNANWELERTNQSGLERCEGEQDKRLHCFATWKNISGSIEIVKQGCWLDDFNCYDRQECVATEENPQVYFCCCEGNFCNERFTHLPEAGGPEVTYEPPPTAPT

SEQ ID NO: 66 - protein, 110 aa, synthetic construct
ETQECIYYNANWELERTNQSGLERCYGDKDKRRHCYASWRNSSGTIELVKKGCWLDDINCYDRTDCVEKKDSPEVYFCCCEGNFCNERFTHLPEAGGPEVTYEPPPTAPT

SEQ ID NO: 67 - protein, 110 aa, synthetic construct
ETQECIYYNANWELERTNQSGLERCYGDKDKRRHCYASWRNSSGTIELVKKGCWLDDINCYDRTDCVEKKDSPEVYFCCCEGNMCNERFTHLPEAGGPEVTYEPPPTAPT

SEQ ID NO: 68 - protein, 110 aa, synthetic construct
ETQECIYYNANWELERTNQSGLERCYGDKDKRRHCFATWKNISGSIEIVKQGCWLDDINCYDRTDCVEKKDSPEVYFCCCEGNMCNERFTHLPEAGGPEVTYEPPPTAPT

SEQ ID NO: 69 - protein, 110 aa, synthetic construct
ETQECIYYNANWELERTNQSGLERCYGDKDKRRHCFATWKNISGSIEIVKQGCWLDDINCYDRTDCVEKKDSPEVYFCCCEGNFCNERFTHLPEAGGPEVTYEPPPTAPT

SEQ ID NO: 70 - protein, 110 aa, synthetic construct
ETRECLFFNANWEKDRTNQTGVEPCEGEQDKRLHCFATWKNISGSIEIVKQGCWLDDINCYDRTDCVEKKDSPEVYFCCCEGNFCNERFTHLPEAGGPEVTYEPPPTAPT

SEQ ID NO: 71 - protein, 110 aa, synthetic construct
ETRECLFFNANWEKDRTNQSGVEPCEGEQDKRLHCYASWRNSSGTIELVKKGCWLDDINCYDRTDCVEKKDSPEVYFCCCEGNFCNERFTHLPEAGGPEVTYEPPPTAPT

SEQ ID NO: 72 - protein, 110 aa, synthetic construct
ETRECLFFNANWEKDRTNQSGVEPCYGDKDKRRHCYASWRNSSGTIELVKKGCWLDDINCYDRTDCVEKKDSPEVYFCCCEGNFCNERFTHLPEAGGPEVTYEPPPTAPT

SEQ ID NO: 73 - protein, 110 aa, synthetic construct
ETRECIYYNANWELERTNQSGLERCYGDKDKRRHCYASWRNSSGTIELVKKGCWLDDFNCYDRTDCVATEENPQVYFCCCEGNFCNERFTHLPEAGGPEVTYEPPPTAPT

SEQ ID NO: 74 - protein, 110 aa, synthetic construct
ETRECIYYNANWELERTNQSGLERCYGDKDKRRHCYASWRNSSGTIELVKQGCWLDDFNCYDRTDCVATEENPQVYFCCCEGNFCNERFTHLPEAGGPEVTYEPPPTAPT

SEQ ID NO: 75 - protein, 110 aa, synthetic construct
ETRECIYYNANWELERTNQSGLERCYGDKDKRRHCYASWRNSSGTIEIVKKGCWLDDFNCYDRTDCVATEENPQVYFCCCEGNFCNERFTHLPEAGGPEVTYEPPPTAPT

SEQ ID NO: 76 - protein, 110 aa, synthetic construct
ETRECIYYNANWELERTNQSGLERCYGDKDKRRHCYASWRNSSGSIELVKKGCWLDDFNCYDRTDCVATEENPQVYFCCCEGNFCNERFTHLPEAGGPEVTYEPPPTAPT

SEQ ID NO: 77 - protein, 110 aa, synthetic construct
ETRECIYYNANWELERTNQSGLERCYGDKDKRRHCYASWRNSSGSIEIVKKGCWLDDFNCYDRTDCVATEENPQVYFCCCEGNFCNERFTHLPEAGGPEVTYEPPPTAPT

SEQ ID NO: 78 - protein, 110 aa, synthetic construct
ETRECIYYNANWELERTNQSGLERCYGDKDKRRHCYASWRNSSGSIEIVKQGCWLDDFNCYDRTDCVATEENPQVYFCCCEGNFCNERFTHLPEAGGPEVTYEPPPTAPT

SEQ ID NO: 79 - protein, 110 aa, synthetic construct; identical to SEQ ID NO: 35

SEQ ID NO: 80 - protein, 110 aa, synthetic construct
ETRECIYYNANWELERTNQSGLERCEGEQDKRLHCYASWRNSSGTIELVKKGCWLDDFNCYDRQECVATEENPQVYFCCCEGNFCNEKFSYFPEMEVTQPTSNPVTPKPP

SEQ ID NO: 81 - protein, 110 aa, synthetic construct
ETRECIYYNANWELERTNQSGLERCEGEQDKRLHCYASWRNSSGTIELVKKGCWLDDFNCYDRQECVATEENPQVYFCCCEGNFCNEKFSYFPQMEVTQPTSNPVTPKPP

SEQ ID NO: 82 - protein, 110 aa, synthetic construct
ETRECIYYNANWELERTNQSGLERCYGDKDKRRHCYASWRNSSGTIELVKKGCWLDDINCYDRTDCVEKKDSPEVYFCCCEGNFCNEKFSYFPEMEVTQPTSNPVTPKPP

SEQ ID NO: 83 - protein, 110 aa, synthetic construct
ETRECIYYNANWELERTNQSGLERCYGDKDKRRHCYASWRNSSGTIELVKKGCWLDDINCYDRTDCVEKKDSPEVYFCCCEGNFCNEKFSYFPQMEVTQPTSNPVTPKPP

SEQ ID NO: 84 - protein, 110 aa, synthetic construct
ETRECIYYNANWELERTNQSGLERCYGDKDKRRHCYASWRNSSGTIELVKKGCWLDDFNCYDRQECVATEENPQVYFCCCEGNFCNEKFSYFPQMEVTQPTSNPVTPKPP

SEQ ID NO: 85 - protein, 110 aa, synthetic construct
ETRECIYYNANWELERTNQSGLERCYGDKDKRRHCYASWRNSSGTIELVKQGCWLDDFNCYDRQECVATEENPQVYFCCCEGNFCNEKFSYFPQMEVTQPTSNPVTPKPP

SEQ ID NO: 86 - protein, 110 aa, synthetic construct
ETRECIYYNANWELERTNQSGLERCYGDKDKRRHCYASWRNSSGTIEIVKKGCWLDDFNCYDRQECVATKENPQVYFCCCEGNFCNEKFSYFPQMEVTQPTSNPVTPKPP

SEQ ID NO: 87 - protein, 110 aa, synthetic construct
ETRECIYYNANWELERTNQSGLERCYGDKDKRRHCYASWRNSSGSIELVKKGCWLDDFNCYDRQECVATKENPQVYFCCCEGNFCNEKFSYFPQMEVTQPTSNPVTPKPP

SEQ ID NO: 88 - protein, 110 aa, synthetic construct
ETRECIYYNANWELERTNQSGLERCEGEQDKRLHCYASWRNSSGSIELVKKGCWLDDFNCYDRQECVATEENPQVYFCCCEGNFCNEKFSYFPQMEVTQPTSNPVTPKPP

SEQ ID NO: 89 - protein, 110 aa, synthetic construct
ETRECIYYNANWELERTNQSGLERCEGEQDKRLHCYASWRNSSGTIEIVKKGCWLDDFNCYDRQECVATEENPQVYFCCCEGNFCNEKFSYFPQMEVTQPTSNPVTPKPP

SEQ ID NO: 90 - protein, 110 aa, synthetic construct
ETRECIYYNANWELERTNQSGLERCEGEQDKRLHCYASWRNSSGTIELVKQGCWLDDFNCYDRQECVATEENPQVYFCCCEGNFCNEKFSYFPQMEVTQPTSNPVTPKPP

SEQ ID NO: 91 - protein, 110 aa, synthetic construct
ETRECIYYNANWELERTNQSGLERCEGEQDKRLHCYASWRNSSGTIELVKKGCWLDDFNCYDRQECVETEENPQVYFCCCEGNFCNEKFSYFPQMEVTQPTSNPVTPKPP

SEQ ID NO: 92 - protein, 110 aa, synthetic construct
ETRECIYYNANWELERTNQSGLERCEGEQDKRLHCYASWRNSSGTIELVKKGCWLDDFNCYDRQECVAKEENPQVYFCCCEGNFCNEKFSYFPQMEVTQPTSNPVTPKPP

SEQ ID NO: 93 - protein, 110 aa, synthetic construct
ETRECIYYNANWELERTNQSGLERCEGEQDKRLHCYASWRNSSGTIELVKKGCWLDDFNCYDRQECVATKENPQVYFCCCEGNFCNEKFSYFPQMEVTQPTSNPVTPKPP

SEQ ID NO: 94 - protein, 110 aa, synthetic construct
ETRECIYYNANWELERTNQSGLERCEGEQDKRLHCYASWRNSSGTIELVKKGCWLDDFNCYDRQECVATEDNPQVYFCCCEGNFCNEKFSYFPQMEVTQPTSNPVTPKPP

SEQ ID NO: 95 - protein, 110 aa, synthetic construct
ETRECIYYNANWELERTNQSGLERCEGEQDKRLHCYASWRNSSGTIELVKKGCWLDDFNCYDRQECVATEESPQVYFCCCEGNFCNEKFSYFPQMEVTQPTSNPVTPKPP

SEQ ID NO: 96 - protein, 110 aa, synthetic construct
ETRECIYYNANWELERTNQSGLERCEGEQDKRLHCYASWRNSSGTIELVKKGCWLDDFNCYDRQECVATEENPEVYFCCCEGNFCNEKFSYFPQMEVTQPTSNPVTPKPP

SEQ ID NO: 97 - protein, 110 aa, synthetic construct
ETRECIYYNANWELERTNQSGLERCEGDKDKRLHCYASWRNSSGTIELVKKGCWLDDFNCYDRQECVETEENPQVYFCCCEGNFCNEKFSYFPQMEVTQPTSNPVTPKPP

SEQ ID NO: 98 - protein, 110 aa, synthetic construct
ETRECIYYNANWELERTNQSGLERCEGEKDKRLHCYASWRNSSGTIELVKKGCWLDDFNCYDRQECVAKEENPQVYFCCCEGNFCNEKFSYFPQMEVTQPTSNPVTPKPP

SEQ ID NO: 99 - protein, 110 aa, synthetic construct
ETRECIYYNANWELERTNQSGLERCEGDQDKRLHCYASWRNSSGTIELVKKGCWLDDFNCYDRQECVATKENPQVYFCCCEGNFCNEKFSYFPQMEVTQPTSNPVTPKPP

SEQ ID NO: 100 - protein, 110 aa, synthetic construct
ETRECIYYNANWELERTNQSGLERCEGDKDKRLHCYASWRNSSGTIELVKQGCWLDDFNCYDRQECVAKKENPQVYFCCCEGNFCNEKFSYFPQMEVTQPTSNPVTPKPP

SEQ ID NO: 101 - protein, 110 aa, synthetic construct
ETRECIYYNANWELERTNQSGLERCEGDKDKRLHCYASWRNSSGTIEIVKQGCWLDDFNCYDRQECVAEKENPQVYFCCCEGNFCNEKFSYFPQMEVTQPTSNPVTPKPP

SEQ ID NO: 102 - protein, 110 aa, synthetic construct
ETRECIYYNANWELERTNQSGLERCYGDQDKRLHCYASWRNSSGSIEIVKQGCWLDDFNCYDRQECVAKKENPQVYFCCCEGNFCNEKFSYFPQMEVTQPTSNPVTPKPP

SEQ ID NO: 103 - protein, 110 aa, synthetic construct
ETRECIYYNANWELERTNQSGLERCEGEKDKRRHCYASWRNSSGTIEIVKKGCWLDDFNCYDRQECVATKENPQVYFCCCEGNFCNEKFSYFPQMEVTQPTSNPVTPKPP

SEQ ID NO: 104 - protein, 110 aa, synthetic construct
ETRECIYYNANWELERTNQSGLERCYGDQDKRRHCYASWRNSSGTIELVKKGCWLDDFNCYDRQECVATEENPEVYFCCCEGNFCNEKFSYFPQMEVTQPTSNPVTPKPP

SEQ ID NO: 105 - protein, 110 aa, synthetic construct
ETRECIYYNANWELERTNQSGLERCEGEQDKRRHCYASWRNSSGTIELVKKGCWLDDFNCYDRQECVATEENPQVYFCCCEGNFCNEKFSYFPQMEVTQPTSNPVTPKPP

SEQ ID NO: 106 - protein, 110 aa, synthetic construct
ETRECIYYNANWELERTNQSGLERCYGEQDKRLHCYASWRNSSGSIEIVKKGCWLDDFNCYDRTDCVATEENPQVYFCCCEGNFCNEKFSYFPQMEVTQPTSNPVTPKPP

SEQ ID NO: 107 - protein, 110 aa, synthetic construct
ETRECIYYNANWELERTNQSGLERCEGEQDKRRHCYASWRNSSGSIELVKKGCWLDDFNCYDRQECVAKEENPQVYFCCCEGNFCNEKFSYFPQMEVTQPTSNPVTPKPP

SEQ ID NO: 108 - protein, 110 aa, synthetic construct
ETRECIYYNANWELERTNQSGLERCEGEQDKRRHCYASWRNSSGTIEIVKKGCWLDDFNCYDRQECVAKEENPQVYFCCCEGNFCNEKFSYFPQMEVTQPTSNPVTPKPP

SEQ ID NO: 109 - protein, 110 aa, synthetic construct
ETRECIYYNANWELERTNQSGLERCEGEQDKRRHCYASWRNSSGSIEIVKKGCWLDDFNCYDRQECVATKENPQVYFCCCEGNFCNEKFSYFPQMEVTQPTSNPVTPKPP

SEQ ID NO: 110 - protein, 110 aa, synthetic construct
ETRECIYYNANWELERTNQSGLERCEGDQDKRLHCYASWRNSSGTIEIVKKGCWLDDFNCYDRQECVATKENPQVYFCCCEGNFCNEKFSYFPQMEVTQPTSNPVTPKPP

SEQ ID NO: 111 - protein, 110 aa, synthetic construct
ETRECIYYNANWELERTNQSGLERCEGDQDKRLHCYASWRNSSGSIELVKKGCWLDDFNCYDRQECVATKENPQVYFCCCEGNFCNEKFSYFPQMEVTQPTSNPVTPKPP

SEQ ID NO: 112 - protein, 110 aa, synthetic construct; identical to SEQ ID NO: 99

SEQ ID NO: 113 - protein, 110 aa, synthetic construct
ETRECIYYNANWELERTNQSGLERCEGEQDKRLHCYASWRNSSGTIEIVKKGCWLDDFNCYDRQECVATKENPQVYFCCCEGNFCNEKFSYFPQMEVTQPTSNPVTPKPP

SEQ ID NO: 114 - protein, 110 aa, synthetic construct; identical to SEQ ID NO: 93

SEQ ID NO: 115 - protein, 110 aa, synthetic construct
ETRECIYYNANWELERTNQSGLERCEGDQDKRLHCYASWRNSSGTIEIVKKGCWLDDFNCYDRQECVAKKENPQVYFCCCEGNFCNEKFSYFPQMEVTQPTSNPVTPKPP

SEQ ID NO: 116 - protein, 110 aa, synthetic construct
ETQECLFFNANWEKDRTNQTGVEPCYGDKDKRRHCFATWKNISGSIEIVKQGCWLDDINCYDRTDCVEKKDSPEVYFCCCEGNMCNERFTHLPEAGGPEVTYEPPPTAPT

SEQ ID NO: 117 - protein, 110 aa, synthetic construct
ETRECIYYNANWELERTNQSGLERCYGDKDKRRHCYASWRNSSGTIELVKKGCWLDDINCYDRQECVATKENPQVYFCCCEGNFCNERFTHLPEAGGPEVTYEPPPTAPT

SEQ ID NO: 118 - protein, 12 aa, synthetic construct
ESKYGPPCPPCP

SEQ ID NO: 119 - protein, 110 aa, synthetic construct
ETRECIYYNANWELERTQQSGLERCEGEQDKRLHCYASWRNSSGTIELVKKGCWLDDFNCYDRQECVATEENPQVYFCCCEGNFCNERFTHLPEAGGPEVTYEPPPTAPT

SEQ ID NO: 120 - protein, 110 aa, synthetic construct
ETRECIYYNANWELERTQQSGLERCYGDKDKRRHCYASWRNSSGTIELVKKGCWLDDINCYDRTDCVEKKDSPEVYFCCCEGNFCNERFTHLPEAGGPEVTYEPPPTAPT

SEQ ID NO: 121 - protein, 110 aa, synthetic construct
ETRECIYYNANWELERTQQSGLERCYGDKDKRRHCYASWRNSSGTIELVKKGCWLDDFNCYDRTDCVEKKDSPEVYFCCCEGNFCNERFTHLPEAGGPEVTYEPPPTAPT

SEQ ID NO: 122 - protein, 110 aa, synthetic construct
ETRECIYYNANWELERTQQSGLERCEGEQDKRLHCYASWRNSSGTIELVKKGCWLDDINCYDRTDCVEKKDSPEVYFCCCEGNFCNERFTHLPEAGGPEVTYEPPPTAPT

SEQ ID NO: 123 - protein, 110 aa, synthetic construct
ETRECIYYNANWELERTQQSGLERCEGEQDKRLHCYASWRNSSGTIELVKKGCWLDDINCYDRTDCVEKKDSPQVYFCCCEGNFCNERFTHLPEAGGPEVTYEPPPTAPT

SEQ ID NO: 124 - protein, 110 aa, synthetic construct
ETRECIYYNANWELERTQQSGLERCEGEQDKRLHCYASWRNSSGTIELVKKGCWLDDFNCYDRTDCVEKKDSPQVYFCCCEGNFCNERFTHLPEAGGPEVTYEPPPTAPT

SEQ ID NO: 125 - protein, 110 aa, synthetic construct
ETRECIYYNANWELERTQQSGLERCEGEQDKRLHCYASWRNSSGTIELVKKGCWLDDFNCYDRTDCVEKKDSPEVYFCCCEGNFCNERFTHLPEAGGPEVTYEPPPTAPT

SEQ ID NO: 126 - protein, 110 aa, synthetic construct
ETRECIYYNANWELERTQQSGLERCEGEQDKRLHCYASWRNSSGTIELVKKGCWLDDFNCYDRQECVEKKDSPEVYFCCCEGNFCNERFTHLPEAGGPEVTYEPPPTAPT

SEQ ID NO: 127 - protein, 110 aa, synthetic construct
ETRECIYYNANWELERTQQSGLERCEGEQDKRLHCYASWRNSSGTIELVKKGCWLDDFNCYDRQECVEKKDSPQVYFCCCEGNFCNERFTHLPEAGGPEVTYEPPPTAPT

SEQ ID NO: 128 - protein, 109 aa, synthetic construct
TRECIYYNANWELERTQQSGLERCEGEQDKRLHCYASWRNSSGTIELVKKGCWLDDINCYDRQECVEKKDSPEVYFCCCEGNFCNERFTHLPEAGGPEVTYEPPPTAPT

SEQ ID NO: 129 - protein, 110 aa, synthetic construct
ETRECIYYNANWELERTQQSGLERCEGEQDKRLHCYASWRNSSGTIELVKKGCWLDDFNCYDRTDCVEKKDSPEVYFCCCEGNMCNERFTHLPEAGGPEVTYEPPPTAPT

SEQ ID NO: 130 - protein, 110 aa, synthetic construct
ETRECIYYNANWELERTQQSGLERCEGDQDKRLHCYASWRNSSGTIELVKKGCWLDDFNCYDRQECVEKKDSPEVYFCCCEGNMCNERFTHLPEAGGPEVTYEPPPTAPT

SEQ ID NO: 131 - protein, 110 aa, synthetic construct
ETQECIYYNANWEKDRTQQTGVEPCYGDKDKRRHCYASWRNSSGTIELVKKGCWLDDFNCYDRQECVATEENPQVYFCCCEGNFCNERFTHLPEAGGPEVTYEPPPTAPT

SEQ ID NO: 132 - protein, 110 aa, synthetic construct
ETQECIYYNANWEKDRTQQTGVEPCEGDQDKRLHCYASWRNSSGTIELVKKGCWLDDFNCYDRQECVATEENPQVYFCCCEGNFCNERFTHLPEAGGPEVTYEPPPTAPT

SEQ ID NO: 133 - protein, 110 aa, synthetic construct
ETRECIYYNANWELERTQQSGLERCYGDKDKRRHCYASWRNSSGTIELVKKGCWLDDFNCYDRQECVATEENPQVYFCCCEGNFCNERFTHLPEAGGPEVTYEPPPTAPT

SEQ ID NO: 134 - protein, 110 aa, synthetic construct
ETRECIYYNANWEKDRTQQTGVEPCEGDQDKRLHCYASWRNSSGTIELVKKGCWLDDFNCYDRQECVATEENPQVYFCCCEGNFCNERFTHLPEAGGPEVTYEPPPTAPT

SEQ ID NO: 135 - protein, 110 aa, synthetic construct; identical to SEQ ID NO: 132

SEQ ID NO: 136 - protein, 110 aa, synthetic construct
ETQECIYYNANWEKDRTQQTGLERCEGEQDKRLHCYASWRNSSGTIELVKKGCWLDDFNCYDRQECVATEENPQVYFCCCEGNFCNERFTHLPEAGGPEVTYEPPPTAPT

SEQ ID NO: 137 - protein, 110 aa, synthetic construct
ETQECIYYNANWEKDRTQQSGLERCEGEQDKRLHCYASWRNSSGTIELVKKGCWLDDFNCYDRQECVATEENPQVYFCCCEGNFCNERFTHLPEAGGPEVTYEPPPTAPT

SEQ ID NO: 138 - protein, 110 aa, synthetic construct
ETRECIYYNANWEKDRTQQSGLERCEGEQDKRLHCYASWRNSSGTIELVKKGCWLDDFNCYDRQECVATEENPQVYFCCCEGNFCNERFTHLPEAGGPEVTYEPPPTAPT

SEQ ID NO: 139 - protein, 110 aa, synthetic construct
ETQECIYYNANWELERTQQSGLERCEGEQDKRLHCYASWRNSSGTIELVKKGCWLDDFNCYDRQECVATEENPQVYFCCCEGNFCNERFTHLPEAGGPEVTYEPPPTAPT

SEQ ID NO: 140 - protein, 110 aa, synthetic construct
ETRECIYYNANWELERTQQSGLERCEGEQDKRLHCFATWRNSSGTIELVKQGCWLDDFNCYDRQECVATEENPQVYFCCCEGNFCNERFTHLPEAGGPEVTYEPPPTAPT

SEQ ID NO: 141 - protein, 110 aa, synthetic construct
ETRECIYYNANWELERTQQSGLERCYGDKDKRRHCYASWRNSSGTIELVKKGCWLDDINCYDRQECVATEENPQVYFCCCEGNFCNERFTHLPEAGGPEVTYEPPPTAPT

SEQ ID NO: 142 - protein, 110 aa, synthetic construct
ETRECIYYNANWELERTQQSGLERCEGEQDKRLHCYASWRNSSGTIELVKKGCWLDDFNCYDRQECVATKENPQVYFCCCEGNFCNERFTHLPEAGGPEVTYEPPPTAPT

SEQ ID NO: 143 - protein, 110 aa, synthetic construct
ETRECIYYNANWELERTQQSGLERCEGEQDKRLHCYASWRNSSGTIELVKKGCWLDDINCYDRQECVATEENPQVYFCCCEGNFCNERFTHLPEAGGPEVTYEPPPTAPT

SEQ ID NO: 144 - protein, 110 aa, synthetic construct
ETRECIYYNANWELERTQQSGLERCEGEQDKRLHCYASWRNSSGTIELVKKGCWLDDINCYDRQECVATKENPQVYFCCCEGNFCNERFTHLPEAGGPEVTYEPPPTAPT

SEQ ID NO: 145 - protein, 110 aa, synthetic construct
ETRECIYYNANWELERTQQSGLERCEGDKDKRLHCYASWRNSSGTIELVKKGCWLDDINCYDRQECVATKENPQVYFCCCEGNFCNERFTHLPEAGGPEVTYEPPPTAPT

SEQ ID NO: 146 - protein, 110 aa, synthetic construct
ETRECIYYNANWELERTQQSGLERCEGDQDKRLHCYASWRNSSGTIELVKKGCWLDDINCYDRQECVATKENPQVYFCCCEGNFCNERFTHLPEAGGPEVTYEPPPTAPT

SEQ ID NO: 147 - protein, 110 aa, synthetic construct
ETRECIYYNANWELERTQQSGLERCEGDQDKRLHCYASWRNSSGTIELVKKGCWLDDFNCYDRQECVATKENPQVYFCCCEGNFCNERFTHLPEAGGPEVTYEPPPTAPT

SEQ ID NO: 148 - protein, 110 aa, synthetic construct
ETRECIYYNANWELERTQQSGLERCEGDQDKRLHCYASWRNSSGTIELVKKGCWLDDFNCYDRQECVATEENPQVYFCCCEGNFCNERFTHLPEAGGPEVTYEPPPTAPT

SEQ ID NO: 149 - protein, 110 aa, synthetic construct
ETRECIYYNANWELERTQQSGLERCYGDKDKRRHCYASWRNSSGTIELVKKGCWLDDINCYDRQECVEKKDSPEVYFCCCEGNFCNERFTHLPEAGGPEVTYEPPPTAPT

SEQ ID NO: 150 - protein, 110 aa, synthetic construct
ETRECIFFNANWEKDRTQQTGVEPCEGEQDKRLHCYASWRNSSGTIELVKKGCWLDDFNCYDRQECVATEENPQVYFCCCEGNFCNERFTHLPEAGGPEVTYEPPPTAPT

SEQ ID NO: 151 - protein, 110 aa, synthetic construct
ETRECIYYNANWELERTQQSGLERCEGEQDKRLHCFATWKNISGSIELVKQGCWLDDFNCYDRQECVATEENPQVYFCCCEGNFCNERFTHLPEAGGPEVTYEPPPTAPT

SEQ ID NO: 152 - protein, 110 aa, synthetic construct
ETRECIYYNANWELERTQQSGLERCEGEQDKRLHCYASWRNSSGTIELVKKGCWLDDFNCYDRTDCVATEENPQVYFCCCEGNFCNERFTHLPEAGGPEVTYEPPPTAPT

SEQ ID NO: 153 - protein, 110 aa, synthetic construct
ETRECIYYNANWELERTQQSGLERCEGEQDKRLHCYASWRNSSGTIELVKKGCWLDDFNCYDRQECVATEENPQVYFCCCEGNMCNERFTHLPEAGGPEVTYEPPPTAPT

SEQ ID NO: 154 - protein, 110 aa, synthetic construct
ETRECIYYNANWELERTQQSGLERCEGDQDKRLHCYASWRNSSGTIELVKKGCWLDDINCYDRQECVATEENPQVYFCCCEGNFCNERFTHLPEAGGPEVTYEPPPTAPT

SEQ ID NO: 155 - protein, 110 aa, synthetic construct
ETQECLFFNANWEKDRTQQSGVEPCYGDKDKRRHCYASWRNSSGTIELVKKGCWLDDFNCYDRQECVATEENPQVYFCCCEGNFCNERFTHLPEAGGPEVTYEPPPTAPT

SEQ ID NO: 156 - protein, 110 aa, synthetic construct
ETQECLFFNANWEKDRTQQSGVEPCEGEQDKRLHCYASWRNSSGTIELVKKGCWLDDFNCYDRQECVATEENPQVYFCCCEGNFCNERFTHLPEAGGPEVTYEPPPTAPT

SEQ ID NO: 157 - protein, 110 aa, synthetic construct
ETRECLFFNANWEKDRTQQSGVEPCEGEQDKRLHCYASWRNSSGTIELVKKGCWLDDFNCYDRQECVATEENPQVYFCCCEGNFCNERFTHLPEAGGPEVTYEPPPTAPT

SEQ ID NO: 158 - protein, 110 aa, synthetic construct
ETQECLFFNANWEKDRTQQSGVEPCYGEQDKRLHCYASWRNSSGTIELVKKGCWLDDFNCYDRQECVATEENPQVYFCCCEGNFCNERFTHLPEAGGPEVTYEPPPTAPT

SEQ ID NO: 159 - protein, 110 aa, synthetic construct
ETRECLFFNANWEKDRTQQSGVEPCYGDKDKRRHCYASWRNSSGTIELVKKGCWLDDFNCYDRQECVATEENPQVYFCCCEGNFCNERFTHLPEAGGPEVTYEPPPTAPT

SEQ ID NO: 160 - protein, 110 aa, synthetic construct
ETRECLFFNANWEKDRTQQTGVEPCYGDKDKRRHCFATWKNISGSIEIVKQGCWLDDFNCYDRQECVATEENPQVYFCCCEGNFCNERFTHLPEAGGPEVTYEPPPTAPT

SEQ ID NO: 161 - protein, 110 aa, synthetic construct
ETRECLFFNANWEKDRTQQTGVEPCYGDKDKRRHCFATWKNISGSIEIVKQGCWLDDINCYDRQECVATEENPQVYFCCCEGNFCNERFTHLPEAGGPEVTYEPPPTAPT

SEQ ID NO: 162 - protein, 110 aa, synthetic construct
ETRECLFFNANWEKDRTQQTGVEPCYGDKDKRRHCFATWKNISGSIEIVKQGCWLDDINCYDRTDCVEKKDSPEVYFCCCEGNFCNERFTHLPEAGGPEVTYEPPPTAPT

SEQ ID NO: 163 - protein, 110 aa, synthetic construct
ETQECIYYNANWELERTQQSGLERCYGDKDKRRHCFATWKNISGSIEIVKQGCWLDDINCYDRQECVATEENPQVYFCCCEGNFCNERFTHLPEAGGPEVTYEPPPTAPT

SEQ ID NO: 164 - protein, 110 aa, synthetic construct
ETRECIYYNANWELERTQQSGLERCYGDKDKRRHCFATWKNISGSIEIVKQGCWLDDINCYDRTDCVEKKDSPEVYFCCCEGNFCNERFTHLPEAGGPEVTYEPPPTAPT

SEQ ID NO: 165 - protein, 110 aa, synthetic construct
ETRECIYYNANWELERTQQSGLERCYGDKDKRRHCFATWKNISGSIEIVKQGCWLDDINCYDRTDCVEKKDSPEVYFCCCEGNMCNERFTHLPEAGGPEVTYEPPPTAPT

SEQ ID NO: 166 - protein, 110 aa, synthetic construct
ETRECIYYNANWELERTQQSGLERCEGEQDKRLHCFATWKNISGSIEIVKQGCWLDDINCYDRTDCVEKKDSPEVYFCCCEGNFCNERFTHLPEAGGPEVTYEPPPTAPT

SEQ ID NO: 167 - protein, 110 aa, synthetic construct
ETRECIYYNANWELERTQQSGLERCEGEQDKRLHCFATWKNISGSIEIVKQGCWLDDINCYDRTDCVATEENPQVYFCCCEGNFCNERFTHLPEAGGPEVTYEPPPTAPT

SEQ ID NO: 168 - protein, 110 aa, synthetic construct
ETRECIYYNANWELERTQQSGLERCEGEQDKRLHCFATWKNISGSIEIVKQGCWLDDFNCYDRTDCVATEENPQVYFCCCEGNFCNERFTHLPEAGGPEVTYEPPPTAPT

SEQ ID NO: 169 - protein, 110 aa, synthetic construct
ETRECIYYNANWELERTQQSGLERCEGEQDKRLHCFATWKNISGSIEIVKQGCWLDDFNCYDRQECVATEENPQVYFCCCEGNFCNERFTHLPEAGGPEVTYEPPPTAPT

SEQ ID NO: 170 - protein, 110 aa, synthetic construct
ETQECIYYNANWELERTQQSGLERCYGDKDKRRHCYASWRNSSGTIELVKKGCWLDDINCYDRTDCVEKKDSPEVYFCCCEGNFCNERFTHLPEAGGPEVTYEPPPTAPT

SEQ ID NO: 171 - protein, 110 aa, synthetic construct
ETQECIYYNANWELERTQQSGLERCYGDKDKRRHCYASWRNSSGTIELVKKGCWLDDINCYDRTDCVEKKDSPEVYFCCCEGNMCNERFTHLPEAGGPEVTYEPPPTAPT

SEQ ID NO: 172 - protein, 110 aa, synthetic construct
ETQECIYYNANWELERTQQSGLERCYGDKDKRRHCFATWKNISGSIEIVKQGCWLDDINCYDRTDCVEKKDSPEVYFCCCEGNMCNERFTHLPEAGGPEVTYEPPPTAPT

SEQ ID NO: 173 - protein, 110 aa, synthetic construct
ETQECIYYNANWELERTQQSGLERCYGDKDKRRHCFATWKNISGSIEIVKQGCWLDDINCYDRTDCVEKKDSPEVYFCCCEGNFCNERFTHLPEAGGPEVTYEPPPTAPT

SEQ ID NO: 174 - protein, 110 aa, synthetic construct
ETRECLFFNANWEKDRTQQTGVEPCEGEQDKRLHCFATWKNISGSIEIVKQGCWLDDINCYDRTDCVEKKDSPEVYFCCCEGNFCNERFTHLPEAGGPEVTYEPPPTAPT

SEQ ID NO: 175 - protein, 110 aa, synthetic construct
ETRECLFFNANWEKDRTQQSGVEPCEGEQDKRLHCYASWRNSSGTIELVKKGCWLDDINCYDRTDCVEKKDSPEVYFCCCEGNFCNERFTHLPEAGGPEVTYEPPPTAPT

SEQ ID NO: 176 - protein, 110 aa, synthetic construct
ETRECLFFNANWEKDRTQQSGVEPCYGDKDKRRHCYASWRNSSGTIELVKKGCWLDDINCYDRTDCVEKKDSPEVYFCCCEGNFCNERFTHLPEAGGPEVTYEPPPTAPT

SEQ ID NO: 177 - protein, 110 aa, synthetic construct
ETRECIYYNANWELERTQQSGLERCYGDKDKRRHCYASWRNSSGTIELVKKGCWLDDFNCYDRTDCVATEENPQVYFCCCEGNFCNERFTHLPEAGGPEVTYEPPPTAPT

SEQ ID NO: 178 - protein, 110 aa, synthetic construct
ETRECIYYNANWELERTQQSGLERCYGDKDKRRHCYASWRNSSGTIELVKQGCWLDDFNCYDRTDCVATEENPQVYFCCCEGNFCNERFTHLPEAGGPEVTYEPPPTAPT

SEQ ID NO: 179 - protein, 110 aa, synthetic construct
ETRECIYYNANWELERTQQSGLERCYGDKDKRRHCYASWRNSSGTIEIVKKGCWLDDFNCYDRTDCVATEENPQVYFCCCEGNFCNERFTHLPEAGGPEVTYEPPPTAPT

SEQ ID NO: 180 - protein, 110 aa, synthetic construct
ETRECIYYNANWELERTQQSGLERCYGDKDKRRHCYASWRNSSGSIELVKKGCWLDDFNCYDRTDCVATEENPQVYFCCCEGNFCNERFTHLPEAGGPEVTYEPPPTAPT

SEQ ID NO: 181 - protein, 110 aa, synthetic construct
ETRECIYYNANWELERTQQSGLERCYGDKDKRRHCYASWRNSSGSIEIVKKGCWLDDFNCYDRTDCVATEENPQVYFCCCEGNFCNERFTHLPEAGGPEVTYEPPPTAPT

SEQ ID NO: 182 - protein, 110 aa, synthetic construct
ETRECIYYNANWELERTQQSGLERCYGDKDKRRHCYASWRNSSGSIEIVKQGCWLDDFNCYDRTDCVATEENPQVYFCCCEGNFCNERFTHLPEAGGPEVTYEPPPTAPT

SEQ ID NO: 183 - protein, 110 aa, synthetic construct; identical to SEQ ID NO: 152

SEQ ID NO: 184 - protein, 110 aa, synthetic construct
ETRECIYYNANWELERTQQSGLERCEGEQDKRLHCYASWRNSSGTIELVKKGCWLDDFNCYDRQECVATEENPQVYFCCCEGNFCNEKFSYFPEMEVTQPTSNPVTPKPP

SEQ ID NO: 185 - protein, 110 aa, synthetic construct
ETRECIYYNANWELERTQQSGLERCEGEQDKRLHCYASWRNSSGTIELVKKGCWLDDFNCYDRQECVATEENPQVYFCCCEGNFCNEKFSYFPQMEVTQPTSNPVTPKPP

SEQ ID NO: 186 - protein, 110 aa, synthetic construct
ETRECIYYNANWELERTQQSGLERCYGDKDKRRHCYASWRNSSGTIELVKKGCWLDDINCYDRTDCVEKKDSPEVYFCCCEGNFCNEKFSYFPEMEVTQPTSNPVTPKPP

SEQ ID NO: 187 - protein, 110 aa, synthetic construct
ETRECIYYNANWELERTQQSGLERCYGDKDKRRHCYASWRNSSGTIELVKKGCWLDDINCYDRTDCVEKKDSPEVYFCCCEGNFCNEKFSYFPQMEVTQPTSNPVTPKPP

SEQ ID NO: 188 - protein, 110 aa, synthetic construct
ETRECIYYNANWELERTQQSGLERCYGDKDKRRHCYASWRNSSGTIELVKKGCWLDDFNCYDRQECVATEENPQVYFCCCEGNFCNEKFSYFPQMEVTQPTSNPVTPKPP

SEQ ID NO: 189 - protein, 110 aa, synthetic construct
ETRECIYYNANWELERTQQSGLERCYGDKDKRRHCYASWRNSSGTIELVKQGCWLDDFNCYDRQECVATEENPQVYFCCCEGNFCNEKFSYFPQMEVTQPTSNPVTPKPP

SEQ ID NO: 190 - protein, 110 aa, synthetic construct
ETRECIYYNANWELERTQQSGLERCYGDKDKRRHCYASWRNSSGTIEIVKKGCWLDDFNCYDRQECVATKENPQVYFCCCEGNFCNEKFSYFPQMEVTQPTSNPVTPKPP

SEQ ID NO: 191 - protein, 110 aa, synthetic construct
ETRECIYYNANWELERTQQSGLERCYGDKDKRRHCYASWRNSSGSIELVKKGCWLDDFNCYDRQECVATKENPQVYFCCCEGNFCNEKFSYFPQMEVTQPTSNPVTPKPP

SEQ ID NO: 192 - protein, 110 aa, synthetic construct
ETRECIYYNANWELERTQQSGLERCEGEQDKRLHCYASWRNSSGSIELVKKGCWLDDFNCYDRQECVATEENPQVYFCCCEGNFCNEKFSYFPQMEVTQPTSNPVTPKPP

SEQ ID NO: 193 - protein, 110 aa, synthetic construct
ETRECIYYNANWELERTQQSGLERCEGEQDKRLHCYASWRNSSGTIEIVKKGCWLDDFNCYDRQECVATEENPQVYFCCCEGNFCNEKFSYFPQMEVTQPTSNPVTPKPP

SEQ ID NO: 194 - protein, 110 aa, synthetic construct
ETRECIYYNANWELERTQQSGLERCEGEQDKRLHCYASWRNSSGTIELVKQGCWLDDFNCYDRQECVATEENPQVYFCCCEGNFCNEKFSYFPQMEVTQPTSNPVTPKPP

SEQ ID NO: 195 - protein, 110 aa, synthetic construct
ETRECIYYNANWELERTQQSGLERCEGEQDKRLHCYASWRNSSGTIELVKKGCWLDDFNCYDRQECVETEENPQVYFCCCEGNFCNEKFSYFPQMEVTQPTSNPVTPKPP

SEQ ID NO: 196 - protein, 110 aa, synthetic construct
ETRECIYYNANWELERTQQSGLERCEGEQDKRLHCYASWRNSSGTIELVKKGCWLDDFNCYDRQECVAKEENPQVYFCCCEGNFCNEKFSYFPQMEVTQPTSNPVTPKPP

SEQ ID NO: 197 - protein, 110 aa, synthetic construct
ETRECIYYNANWELERTQQSGLERCEGEQDKRLHCYASWRNSSGTIELVKKGCWLDDFNCYDRQECVATKENPQVYFCCCEGNFCNEKFSYFPQMEVTQPTSNPVTPKPP

SEQ ID NO: 198 - protein, 110 aa, synthetic construct
ETRECIYYNANWELERTQQSGLERCEGEQDKRLHCYASWRNSSGTIELVKKGCWLDDFNCYDRQECVATEDNPQVYFCCCEGNFCNEKFSYFPQMEVTQPTSNPVTPKPP

SEQ ID NO: 199 - protein, 110 aa, synthetic construct
ETRECIYYNANWELERTQQSGLERCEGEQDKRLHCYASWRNSSGTIELVKKGCWLDDFNCYDRQECVATEESPQVYFCCCEGNFCNEKFSYFPQMEVTQPTSNPVTPKPP

SEQ ID NO: 200 - protein, 110 aa, synthetic construct
ETRECIYYNANWELERTQQSGLERCEGEQDKRLHCYASWRNSSGTIELVKKGCWLDDFNCYDRQECVATEENPEVYFCCCEGNFCNEKFSYFPQMEVTQPTSNPVTPKPP

SEQ ID NO: 201 - protein, 110 aa, synthetic construct
ETRECIYYNANWELERTQQSGLERCEGDKDKRLHCYASWRNSSGTIELVKKGCWLDDFNCYDRQECVETEENPQVYFCCCEGNFCNEKFSYFPQMEVTQPTSNPVTPKPP

SEQ ID NO: 202 - protein, 110 aa, synthetic construct
ETRECIYYNANWELERTQQSGLERCEGEKDKRLHCYASWRNSSGTIELVKKGCWLDDFNCYDRQECVAKEENPQVYFCCCEGNFCNEKFSYFPQMEVTQPTSNPVTPKPP

SEQ ID NO: 203 - protein, 110 aa, synthetic construct
ETRECIYYNANWELERTQQSGLERCEGDQDKRLHCYASWRNSSGTIELVKKGCWLDDFNCYDRQECVATKENPQVYFCCCEGNFCNEKFSYFPQMEVTQPTSNPVTPKPP

SEQ ID NO: 204 - protein, 110 aa, synthetic construct
ETRECIYYNANWELERTQQSGLERCEGDKDKRLHCYASWRNSSGTIELVKQGCWLDDFNCYDRQECVAKKENPQVYFCCCEGNFCNEKFSYFPQMEVTQPTSNPVTPKPP

SEQ ID NO: 205 - protein, 110 aa, synthetic construct
ETRECIYYNANWELERTQQSGLERCEGDKDKRLHCYASWRNSSGTIEIVKQGCWLDDFNCYDRQECVAEKENPQVYFCCCEGNFCNEKFSYFPQMEVTQPTSNPVTPKPP

SEQ ID NO: 206 - protein, 110 aa, synthetic construct
ETRECIYYNANWELERTQQSGLERCYGDQDKRLHCYASWRNSSGSIEIVKQGCWLDDFNCYDRQECVAKKENPQVYFCCCEGNFCNEKFSYFPQMEVTQPTSNPVTPKPP

SEQ ID NO: 207 - protein, 110 aa, synthetic construct
ETRECIYYNANWELERTQQSGLERCEGEKDKRRHCYASWRNSSGTIEIVKKGCWLDDFNCYDRQECVATKENPQVYFCCCEGNFCNEKFSYFPQMEVTQPTSNPVTPKPP

SEQ ID NO: 208 - protein, 110 aa, synthetic construct
ETRECIYYNANWELERTQQSGLERCYGDQDKRRHCYASWRNSSGTIELVKKGCWLDDFNCYDRQECVATEENPEVYFCCCEGNFCNEKFSYFPQMEVTQPTSNPVTPKPP

SEQ ID NO: 209 - protein, 110 aa, synthetic construct
ETRECIYYNANWELERTQQSGLERCEGEQDKRRHCYASWRNSSGTIELVKKGCWLDDFNCYDRQECVATEENPQVYFCCCEGNFCNEKFSYFPQMEVTQPTSNPVTPKPP

SEQ ID NO: 210 - protein, 110 aa, synthetic construct
ETRECIYYNANWELERTQQSGLERCYGEQDKRLHCYASWRNSSGSIEIVKKGCWLDDFNCYDRTDCVATEENPQVYFCCCEGNFCNEKFSYFPQMEVTQPTSNPVTPKPP

SEQ ID NO: 211 - protein, 110 aa, synthetic construct
ETRECIYYNANWELERTQQSGLERCEGEQDKRRHCYASWRNSSGSIELVKKGCWLDDFNCYDRQECVAKEENPQVYFCCCEGNFCNEKFSYFPQMEVTQPTSNPVTPKPP

SEQ ID NO: 212 - protein, 110 aa, synthetic construct
ETRECIYYNANWELERTQQSGLERCEGEQDKRRHCYASWRNSSGTIEIVKKGCWLDDFNCYDRQECVAKEENPQVYFCCCEGNFCNEKFSYFPQMEVTQPTSNPVTPKPP

SEQ ID NO: 213 - protein, 110 aa, synthetic construct
ETRECIYYNANWELERTQQSGLERCEGEQDKRRHCYASWRNSSGSIEIVKKGCWLDDFNCYDRQECVATKENPQVYFCCCEGNFCNEKFSYFPQMEVTQPTSNPVTPKPP

SEQ ID NO: 214 - protein, 110 aa, synthetic construct
ETRECIYYNANWELERTQQSGLERCEGDQDKRLHCYASWRNSSGTIEIVKKGCWLDDFNCYDRQECVATKENPQVYFCCCEGNFCNEKFSYFPQMEVTQPTSNPVTPKPP

SEQ ID NO: 215 - protein, 110 aa, synthetic construct
ETRECIYYNANWELERTQQSGLERCEGDQDKRLHCYASWRNSSGSIELVKKGCWLDDFNCYDRQECVATKENPQVYFCCCEGNFCNEKFSYFPQMEVTQPTSNPVTPKPP

SEQ ID NO: 216 - protein, 110 aa, synthetic construct; identical to SEQ ID NO: 203

SEQ ID NO: 217 - protein, 110 aa, synthetic construct
ETRECIYYNANWELERTQQSGLERCEGEQDKRLHCYASWRNSSGTIEIVKKGCWLDDFNCYDRQECVATKENPQVYFCCCEGNFCNEKFSYFPQMEVTQPTSNPVTPKPP

SEQ ID NO: 218 - protein, 110 aa, synthetic construct; identical to SEQ ID NO: 197

SEQ ID NO: 219 - protein, 110 aa, synthetic construct
ETRECIYYNANWELERTQQSGLERCEGDQDKRLHCYASWRNSSGTIEIVKKGCWLDDFNCYDRQECVAKKENPQVYFCCCEGNFCNEKFSYFPQMEVTQPTSNPVTPKPP

SEQ ID NO: 220 - protein, 110 aa, synthetic construct
ETQECLFFNANWEKDRTQQTGVEPCYGDKDKRRHCFATWKNISGSIEIVKQGCWLDDINCYDRTDCVEKKDSPEVYFCCCEGNMCNERFTHLPEAGGPEVTYEPPPTAPT

SEQ ID NO: 221 - protein, 110 aa, synthetic construct
ETRECIYYNANWELERTQQSGLERCYGDKDKRRHCYASWRNSSGTIELVKKGCWLDDINCYDRQECVATKENPQVYFCCCEGNFCNERFTHLPEAGGPEVTYEPPPTAPT

SEQ ID NO: 222 - protein, 343 aa, synthetic construct
ETRECIYYNANWELERTQQSGLERCEGDQDKRLHCYASWRNSSGTIELVKKGCWLDDINCYDRQECVATKENPQVYFCCCEGNFCNERFTHLPEAGGPEVTYEPPPTAPTGGGGSESKYGPPCPPCPAPEFLGGPSVFLFPPKPKDTLMISRTPEVTCVVVDVSQEDPEVQFNWYVDGVEVHNAKTKPREEQFNSTYRVVSVLTVLHQDWLNGKEYKCKVSNKGLPSSIEKTISKAKGQPREPQVYTLPPSQEEMTKNQVSLTCLVKGFYPSDIAVEWESNGQPENNYKTTPPVLDSDGSFFLYSRLTVDKSRWQEGNVFSCSVMHEALHNHYTQKSLSLSLG

SEQ ID NO: 223 - protein, 110 aa, synthetic construct
  VARIANT 18: note = Wherein X is any amino acid that is not N
ETRECIYYNANWELERTXQSGLERCEGEQDKRLHCYASWRNSSGTIELVKKGCWLDDFNCYDRQECVATEENPQVYFCCCEGNFCNERFTHLPEAGGPEVTYEPPPTAPT

SEQ ID NO: 224 - protein, 110 aa, synthetic construct
  VARIANT 18: note = Wherein X is any amino acid that is not N
ETRECIYYNANWELERTXQSGLERCYGDKDKRRHCYASWRNSSGTIELVKKGCWLDDINCYDRTDCVEKKDSPEVYFCCCEGNFCNERFTHLPEAGGPEVTYEPPPTAPT

SEQ ID NO: 225 - protein, 110 aa, synthetic construct
  VARIANT 18: note = Wherein X is any amino acid that is not N
ETRECIYYNANWELERTXQSGLERCYGDKDKRRHCYASWRNSSGTIELVKKGCWLDDFNCYDRTDCVEKKDSPEVYFCCCEGNFCNERFTHLPEAGGPEVTYEPPPTAPT

SEQ ID NO: 226 - protein, 110 aa, synthetic construct
  VARIANT 18: note = Wherein X is any amino acid that is not N
ETRECIYYNANWELERTXQSGLERCEGEQDKRLHCYASWRNSSGTIELVKKGCWLDDINCYDRTDCVEKKDSPEVYFCCCEGNFCNERFTHLPEAGGPEVTYEPPPTAPT

SEQ ID NO: 227 - protein, 110 aa, synthetic construct
  VARIANT 18: note = Wherein X is any amino acid that is not N
ETRECIYYNANWELERTXQSGLERCEGEQDKRLHCYASWRNSSGTIELVKKGCWLDDINCYDRTDCVEKKDSPQVYFCCCEGNFCNERFTHLPEAGGPEVTYEPPPTAPT

SEQ ID NO: 228 - protein, 110 aa, synthetic construct
  VARIANT 18: note = Wherein X is any amino acid that is not N
ETRECIYYNANWELERTXQSGLERCEGEQDKRLHCYASWRNSSGTIELVKKGCWLDDFNCYDRTDCVEKKDSPQVYFCCCEGNFCNERFTHLPEAGGPEVTYEPPPTAPT

SEQ ID NO: 229 - protein, 110 aa, synthetic construct
  VARIANT 18: note = Wherein X is any amino acid that is not N
ETRECIYYNANWELERTXQSGLERCEGEQDKRLHCYASWRNSSGTIELVKKGCWLDDFNCYDRTDCVEKKDSPEVYFCCCEGNFCNERFTHLPEAGGPEVTYEPPPTAPT

SEQ ID NO: 230 - protein, 110 aa, synthetic construct
  VARIANT 18: note = Wherein X is any amino acid that is not N
ETRECIYYNANWELERTXQSGLERCEGEQDKRLHCYASWRNSSGTIELVKKGCWLDDFNCYDRQECVEKKDSPEVYFCCCEGNFCNERFTHLPEAGGPEVTYEPPPTAPT

SEQ ID NO: 231 - protein, 110 aa, synthetic construct
  VARIANT 18: note = Wherein X is any amino acid that is not N
ETRECIYYNANWELERTXQSGLERCEGEQDKRLHCYASWRNSSGTIELVKKGCWLDDFNCYDRQECVEKKDSPQVYFCCCEGNFCNERFTHLPEAGGPEVTYEPPPTAPT

SEQ ID NO: 232 - protein, 109 aa, synthetic construct
  VARIANT 17: note = Wherein X is any amino acid that is not N
TRECIYYNANWELERTXQSGLERCEGEQDKRLHCYASWRNSSGTIELVKKGCWLDDINCYDRQECVEKKDSPEVYFCCCEGNFCNERFTHLPEAGGPEVTYEPPPTAPT

SEQ ID NO: 233 - protein, 110 aa, synthetic construct
  VARIANT 18: note = Wherein X is any amino acid that is not N
ETRECIYYNANWELERTXQSGLERCEGEQDKRLHCYASWRNSSGTIELVKKGCWLDDFNCYDRTDCVEKKDSPEVYFCCCEGNMCNERFTHLPEAGGPEVTYEPPPTAPT

SEQ ID NO: 234 - protein, 110 aa, synthetic construct
  VARIANT 18: note = Wherein X is any amino acid that is not N
ETRECIYYNANWELERTXQSGLERCEGDQDKRLHCYASWRNSSGTIELVKKGCWLDDFNCYDRQECVEKKDSPEVYFCCCEGNMCNERFTHLPEAGGPEVTYEPPPTAPT

SEQ ID NO: 235 - protein, 110 aa, synthetic construct
  VARIANT 18: note = Wherein X is any amino acid that is not N
ETQECIYYNANWEKDRTXQTGVEPCYGDKDKRRHCYASWRNSSGTIELVKKGCWLDDFNCYDRQECVATEENPQVYFCCCEGNFCNERFTHLPEAGGPEVTYEPPPTAPT

SEQ ID NO: 236 - protein, 110 aa, synthetic construct
  VARIANT 18: note = Wherein X is any amino acid that is not N
ETQECIYYNANWEKDRTXQTGVEPCEGDQDKRLHCYASWRNSSGTIELVKKGCWLDDFNCYDRQECVATEENPQVYFCCCEGNFCNERFTHLPEAGGPEVTYEPPPTAPT

SEQ ID NO: 237 - protein, 110 aa, synthetic construct
  VARIANT 18: note = Wherein X is any amino acid that is not N
ETRECIYYNANWELERTXQSGLERCYGDKDKRRHCYASWRNSSGTIELVKKGCWLDDFNCYDRQECVATEENPQVYFCCCEGNFCNERFTHLPEAGGPEVTYEPPPTAPT

SEQ ID NO: 238 - protein, 110 aa, synthetic construct
  VARIANT 18: note = Wherein X is any amino acid that is not N
ETRECIYYNANWEKDRTXQTGVEPCEGDQDKRLHCYASWRNSSGTIELVKKGCWLDDFNCYDRQECVATEENPQVYFCCCEGNFCNERFTHLPEAGGPEVTYEPPPTAPT

SEQ ID NO: 239 - protein, 110 aa, synthetic construct; identical to SEQ ID NO: 236
  VARIANT 18: note = Wherein X is any amino acid that is not N

SEQ ID NO: 240 - protein, 110 aa, synthetic construct
  VARIANT 18: note = Wherein X is any amino acid that is not N
ETQECIYYNANWEKDRTXQTGLERCEGEQDKRLHCYASWRNSSGTIELVKKGCWLDDFNCYDRQECVATEENPQVYFCCCEGNFCNERFTHLPEAGGPEVTYEPPPTAPT

SEQ ID NO: 241 - protein, 110 aa, synthetic construct
  VARIANT 18: note = Wherein X is any amino acid that is not N
ETQECIYYNANWEKDRTXQSGLERCEGEQDKRLHCYASWRNSSGTIELVKKGCWLDDFNCYDRQECVATEENPQVYFCCCEGNFCNERFTHLPEAGGPEVTYEPPPTAPT

SEQ ID NO: 242 - protein, 110 aa, synthetic construct
  VARIANT 18: note = Wherein X is any amino acid that is not N
ETRECIYYNANWEKDRTXQSGLERCEGEQDKRLHCYASWRNSSGTIELVKKGCWLDDFNCYDRQECVATEENPQVYFCCCEGNFCNERFTHLPEAGGPEVTYEPPPTAPT

SEQ ID NO: 243 - protein, 110 aa, synthetic construct
  VARIANT 18: note = Wherein X is any amino acid that is not N
ETQECIYYNANWELERTXQSGLERCEGEQDKRLHCYASWRNSSGTIELVKKGCWLDDFNCYDRQECVATEENPQVYFCCCEGNFCNERFTHLPEAGGPEVTYEPPPTAPT

SEQ ID NO: 244 - protein, 110 aa, synthetic construct
  VARIANT 18: note = Wherein X is any amino acid that is not N
ETRECIYYNANWELERTXQSGLERCEGEQDKRLHCFATWRNSSGTIELVKQGCWLDDFNCYDRQECVATEENPQVYFCCCEGNFCNERFTHLPEAGGPEVTYEPPPTAPT

SEQ ID NO: 245 - protein, 110 aa, synthetic construct
  VARIANT 18: note = Wherein X is any amino acid that is not N
ETRECIYYNANWELERTXQSGLERCYGDKDKRRHCYASWRNSSGTIELVKKGCWLDDINCYDRQECVATEENPQVYFCCCEGNFCNERFTHLPEAGGPEVTYEPPPTAPT

SEQ ID NO: 246 - protein, 110 aa, synthetic construct
  VARIANT 18: note = Wherein X is any amino acid that is not N
ETRECIYYNANWELERTXQSGLERCEGEQDKRLHCYASWRNSSGTIELVKKGCWLDDFNCYDRQECVATKENPQVYFCCCEGNFCNERFTHLPEAGGPEVTYEPPPTAPT

SEQ ID NO: 247 - protein, 110 aa, synthetic construct
  VARIANT 18: note = Wherein X is any amino acid that is not N
ETRECIYYNANWELERTXQSGLERCEGEQDKRLHCYASWRNSSGTIELVKKGCWLDDINCYDRQECVATEENPQVYFCCCEGNFCNERFTHLPEAGGPEVTYEPPPTAPT

SEQ ID NO: 248 - protein, 110 aa, synthetic construct
  VARIANT 18: note = Wherein X is any amino acid that is not N
ETRECIYYNANWELERTXQSGLERCEGEQDKRLHCYASWRNSSGTIELVKKGCWLDDINCYDRQECVATKENPQVYFCCCEGNFCNERFTHLPEAGGPEVTYEPPPTAPT

SEQ ID NO: 249 - protein, 110 aa, synthetic construct
  VARIANT 18: note = Wherein X is any amino acid that is not N
ETRECIYYNANWELERTXQSGLERCEGDKDKRLHCYASWRNSSGTIELVKKGCWLDDINCYDRQECVATKENPQVYFCCCEGNFCNERFTHLPEAGGPEVTYEPPPTAPT

SEQ ID NO: 250 - protein, 110 aa, synthetic construct
  VARIANT 18: note = Wherein X is any amino acid that is not N
ETRECIYYNANWELERTXQSGLERCEGDQDKRLHCYASWRNSSGTIELVKKGCWLDDINCYDRQECVATKENPQVYFCCCEGNFCNERFTHLPEAGGPEVTYEPPPTAPT

SEQ ID NO: 251 - protein, 110 aa, synthetic construct
  VARIANT 18: note = Wherein X is any amino acid that is not N
ETRECIYYNANWELERTXQSGLERCEGDQDKRLHCYASWRNSSGTIELVKKGCWLDDFNCYDRQECVATKENPQVYFCCCEGNFCNERFTHLPEAGGPEVTYEPPPTAPT

SEQ ID NO: 252 - protein, 110 aa, synthetic construct
  VARIANT 18: note = Wherein X is any amino acid that is not N
ETRECIYYNANWELERTXQSGLERCEGDQDKRLHCYASWRNSSGTIELVKKGCWLDDFNCYDRQECVATEENPQVYFCCCEGNFCNERFTHLPEAGGPEVTYEPPPTAPT

SEQ ID NO: 253 - protein, 110 aa, synthetic construct
  VARIANT 18: note = Wherein X is any amino acid that is not N
ETRECIYYNANWELERTXQSGLERCYGDKDKRRHCYASWRNSSGTIELVKKGCWLDDINCYDRQECVEKKDSPEVYFCCCEGNFCNERFTHLPEAGGPEVTYEPPPTAPT

SEQ ID NO: 254 - protein, 110 aa, synthetic construct
  VARIANT 18: note = Wherein X is any amino acid that is not N
ETRECIFFNANWEKDRTXQTGVEPCEGEQDKRLHCYASWRNSSGTIELVKKGCWLDDFNCYDRQECVATEENPQVYFCCCEGNFCNERFTHLPEAGGPEVTYEPPPTAPT

SEQ ID NO: 255 - protein, 110 aa, synthetic construct
  VARIANT 18: note = Wherein X is any amino acid that is not N
ETRECIYYNANWELERTXQSGLERCEGEQDKRLHCFATWKNISGSIELVKQGCWLDDFNCYDRQECVATEENPQVYFCCCEGNFCNERFTHLPEAGGPEVTYEPPPTAPT

SEQ ID NO: 256 - protein, 110 aa, synthetic construct
  VARIANT 18: note = Wherein X is any amino acid that is not N
ETRECIYYNANWELERTXQSGLERCEGEQDKRLHCYASWRNSSGTIELVKKGCWLDDFNCYDRTDCVATEENPQVYFCCCEGNFCNERFTHLPEAGGPEVTYEPPPTAPT

SEQ ID NO: 257 - protein, 110 aa, synthetic construct
  VARIANT 18: note = Wherein X is any amino acid that is not N
ETRECIYYNANWELERTXQSGLERCEGEQDKRLHCYASWRNSSGTIELVKKGCWLDDFNCYDRQECVATEENPQVYFCCCEGNMCNERFTHLPEAGGPEVTYEPPPTAPT

SEQ ID NO: 258 - protein, 110 aa, synthetic construct
  VARIANT 18: note = Wherein X is any amino acid that is not N
ETRECIYYNANWELERTXQSGLERCEGDQDKRLHCYASWRNSSGTIELVKKGCWLDDINCYDRQECVATEENPQVYFCCCEGNFCNERFTHLPEAGGPEVTYEPPPTAPT

SEQ ID NO: 259 - protein, 110 aa, synthetic construct
  VARIANT 18: note = Wherein X is any amino acid that is not N
ETQECLFFNANWEKDRTXQSGVEPCYGDKDKRRHCYASWRNSSGTIELVKKGCWLDDFNCYDRQECVATEENPQVYFCCCEGNFCNERFTHLPEAGGPEVTYEPPPTAPT

SEQ ID NO: 260 - protein, 110 aa, synthetic construct
  VARIANT 18: note = Wherein X is any amino acid that is not N
ETQECLFFNANWEKDRTXQSGVEPCEGEQDKRLHCYASWRNSSGTIELVKKGCWLDDFNCYDRQECVATEENPQVYFCCCEGNFCNERFTHLPEAGGPEVTYEPPPTAPT

SEQ ID NO: 261 - protein, 110 aa, synthetic construct
  VARIANT 18: note = Wherein X is any amino acid that is not N
ETRECLFFNANWEKDRTXQSGVEPCEGEQDKRLHCYASWRNSSGTIELVKKGCWLDDFNCYDRQECVATEENPQVYFCCCEGNFCNERFTHLPEAGGPEVTYEPPPTAPT

SEQ ID NO: 262 - protein, 110 aa, synthetic construct
  VARIANT 18: note = Wherein X is any amino acid that is not N
ETQECLFFNANWEKDRTXQSGVEPCYGEQDKRLHCYASWRNSSGTIELVKKGCWLDDFNCYDRQECVATEENPQVYFCCCEGNFCNERFTHLPEAGGPEVTYEPPPTAPT

SEQ ID NO: 263 - protein, 110 aa, synthetic construct
  VARIANT 18: note = Wherein X is any amino acid that is not N
ETRECLFFNANWEKDRTXQSGVEPCYGDKDKRRHCYASWRNSSGTIELVKKGCWLDDFNCYDRQECVATEENPQVYFCCCEGNFCNERFTHLPEAGGPEVTYEPPPTAPT

SEQ ID NO: 264 - protein, 110 aa, synthetic construct
  VARIANT 18: note = Wherein X is any amino acid that is not N
ETRECLFFNANWEKDRTXQTGVEPCYGDKDKRRHCFATWKNISGSIEIVKQGCWLDDFNCYDRQECVATEENPQVYFCCCEGNFCNERFTHLPEAGGPEVTYEPPPTAPT

SEQ ID NO: 265 - protein, 110 aa, synthetic construct
  VARIANT 18: note = Wherein X is any amino acid that is not N
ETRECLFFNANWEKDRTXQTGVEPCYGDKDKRRHCFATWKNISGSIEIVKQGCWLDDINCYDRQECVATEENPQVYFCCCEGNFCNERFTHLPEAGGPEVTYEPPPTAPT

SEQ ID NO: 266 - protein, 110 aa, synthetic construct
  VARIANT 18: note = Wherein X is any amino acid that is not N
ETRECLFFNANWEKDRTXQTGVEPCYGDKDKRRHCFATWKNISGSIEIVKQGCWLDDINCYDRTDCVEKKDSPEVYFCCCEGNFCNERFTHLPEAGGPEVTYEPPPTAPT

SEQ ID NO: 267 - protein, 110 aa, synthetic construct
  VARIANT 18: note = Wherein X is any amino acid that is not N
ETQECIYYNANWELERTXQSGLERCYGDKDKRRHCFATWKNISGSIEIVKQGCWLDDINCYDRQECVATEENPQVYFCCCEGNFCNERFTHLPEAGGPEVTYEPPPTAPT

SEQ ID NO: 268 - protein, 110 aa, synthetic construct
  VARIANT 18: note = Wherein X is any amino acid that is not N
ETRECIYYNANWELERTXQSGLERCYGDKDKRRHCFATWKNISGSIEIVKQGCWLDDINCYDRTDCVEKKDSPEVYFCCCEGNFCNERFTHLPEAGGPEVTYEPPPTAPT

SEQ ID NO: 269 - protein, 110 aa, synthetic construct
  VARIANT 18: note = Wherein X is any amino acid that is not N
ETRECIYYNANWELERTXQSGLERCYGDKDKRRHCFATWKNISGSIEIVKQGCWLDDINCYDRTDCVEKKDSPEVYFCCCEGNMCNERFTHLPEAGGPEVTYEPPPTAPT

SEQ ID NO: 270 - protein, 110 aa, synthetic construct
  VARIANT 18: note = Wherein X is any amino acid that is not N
ETRECIYYNANWELERTXQSGLERCEGEQDKRLHCFATWKNISGSIEIVKQGCWLDDINCYDRTDCVEKKDSPEVYFCCCEGNFCNERFTHLPEAGGPEVTYEPPPTAPT

SEQ ID NO: 271 - protein, 110 aa, synthetic construct
  VARIANT 18: note = Wherein X is any amino acid that is not N
ETRECIYYNANWELERTXQSGLERCEGEQDKRLHCFATWKNISGSIEIVKQGCWLDDINCYDRTDCVATEENPQVYFCCCEGNFCNERFTHLPEAGGPEVTYEPPPTAPT

SEQ ID NO: 272 - protein, 110 aa, synthetic construct
  VARIANT 18: note = Wherein X is any amino acid that is not N
ETRECIYYNANWELERTXQSGLERCEGEQDKRLHCFATWKNISGSIEIVKQGCWLDDFNCYDRTDCVATEENPQVYFCCCEGNFCNERFTHLPEAGGPEVTYEPPPTAPT

SEQ ID NO: 273 - protein, 110 aa, synthetic construct
  VARIANT 18: note = Wherein X is any amino acid that is not N
ETRECIYYNANWELERTXQSGLERCEGEQDKRLHCFATWKNISGSIEIVKQGCWLDDFNCYDRQECVATEENPQVYFCCCEGNFCNERFTHLPEAGGPEVTYEPPPTAPT

SEQ ID NO: 274 - protein, 110 aa, synthetic construct
  VARIANT 18: note = Wherein X is any amino acid that is not N
ETQECIYYNANWELERTXQSGLERCYGDKDKRRHCYASWRNSSGTIELVKKGCWLDDINCYDRTDCVEKKDSPEVYFCCCEGNFCNERFTHLPEAGGPEVTYEPPPTAPT

SEQ ID NO: 275 - protein, 110 aa, synthetic construct
  VARIANT 18: note = Wherein X is any amino acid that is not N
ETQECIYYNANWELERTXQSGLERCYGDKDKRRHCYASWRNSSGTIELVKKGCWLDDINCYDRTDCVEKKDSPEVYFCCCEGNMCNERFTHLPEAGGPEVTYEPPPTAPT

SEQ ID NO: 276 - protein, 110 aa, synthetic construct
  VARIANT 18: note = Wherein X is any amino acid that is not N
ETQECIYYNANWELERTXQSGLERCYGDKDKRRHCFATWKNISGSIEIVKQGCWLDDINCYDRTDCVEKKDSPEVYFCCCEGNMCNERFTHLPEAGGPEVTYEPPPTAPT

SEQ ID NO: 277 - protein, 110 aa, synthetic construct
  VARIANT 18: note = Wherein X is any amino acid that is not N
ETQECIYYNANWELERTXQSGLERCYGDKDKRRHCFATWKNISGSIEIVKQGCWLDDINCYDRTDCVEKKDSPEVYFCCCEGNFCNERFTHLPEAGGPEVTYEPPPTAPT

SEQ ID NO: 278 - protein, 110 aa, synthetic construct
  VARIANT 18: note = Wherein X is any amino acid that is not N
ETRECLFFNANWEKDRTXQTGVEPCEGEQDKRLHCFATWKNISGSIEIVKQGCWLDDINCYDRTDCVEKKDSPEVYFCCCEGNFCNERFTHLPEAGGPEVTYEPPPTAPT

SEQ ID NO: 279 - protein, 110 aa, synthetic construct
  VARIANT 18: note = Wherein X is any amino acid that is not N
ETRECLFFNANWEKDRTXQSGVEPCEGEQDKRLHCYASWRNSSGTIELVKKGCWLDDINCYDRTDCVEKKDSPEVYFCCCEGNFCNERFTHLPEAGGPEVTYEPPPTAPT

SEQ ID NO: 280 - protein, 110 aa, synthetic construct
  VARIANT 18: note = Wherein X is any amino acid that is not N
ETRECLFFNANWEKDRTXQSGVEPCYGDKDKRRHCYASWRNSSGTIELVKKGCWLDDINCYDRTDCVEKKDSPEVYFCCCEGNFCNERFTHLPEAGGPEVTYEPPPTAPT

SEQ ID NO: 281 - protein, 110 aa, synthetic construct
  VARIANT 18: note = Wherein X is any amino acid that is not N
ETRECIYYNANWELERTXQSGLERCYGDKDKRRHCYASWRNSSGTIELVKKGCWLDDFNCYDRTDCVATEENPQVYFCCCEGNFCNERFTHLPEAGGPEVTYEPPPTAPT

SEQ ID NO: 282 - protein, 110 aa, synthetic construct
  VARIANT 18: note = Wherein X is any amino acid that is not N
ETRECIYYNANWELERTXQSGLERCYGDKDKRRHCYASWRNSSGTIELVKQGCWLDDFNCYDRTDCVATEENPQVYFCCCEGNFCNERFTHLPEAGGPEVTYEPPPTAPT

SEQ ID NO: 283 - protein, 110 aa, synthetic construct
  VARIANT 18: note = Wherein X is any amino acid that is not N
ETRECIYYNANWELERTXQSGLERCYGDKDKRRHCYASWRNSSGTIEIVKKGCWLDDFNCYDRTDCVATEENPQVYFCCCEGNFCNERFTHLPEAGGPEVTYEPPPTAPT

SEQ ID NO: 284 - protein, 110 aa, synthetic construct
  VARIANT 18: note = Wherein X is any amino acid that is not N
ETRECIYYNANWELERTXQSGLERCYGDKDKRRHCYASWRNSSGSIELVKKGCWLDDFNCYDRTDCVATEENPQVYFCCCEGNFCNERFTHLPEAGGPEVTYEPPPTAPT

SEQ ID NO: 285 - protein, 110 aa, synthetic construct
  VARIANT 18: note = Wherein X is any amino acid that is not N
ETRECIYYNANWELERTXQSGLERCYGDKDKRRHCYASWRNSSGSIEIVKKGCWLDDFNCYDRTDCVATEENPQVYFCCCEGNFCNERFTHLPEAGGPEVTYEPPPTAPT

SEQ ID NO: 286 - protein, 110 aa, synthetic construct
  VARIANT 18: note = Wherein X is any amino acid that is not N
ETRECIYYNANWELERTXQSGLERCYGDKDKRRHCYASWRNSSGSIEIVKQGCWLDDFNCYDRTDCVATEENPQVYFCCCEGNFCNERFTHLPEAGGPEVTYEPPPTAPT

SEQ ID NO: 287 - protein, 110 aa, synthetic construct; identical to SEQ ID NO: 256
  VARIANT 18: note = Wherein X is any amino acid that is not N

SEQ ID NO: 288 - protein, 110 aa, synthetic construct
  VARIANT 18: note = Wherein X is any amino acid that is not N
ETRECIYYNANWELERTXQSGLERCEGEQDKRLHCYASWRNSSGTIELVKKGCWLDDFNCYDRQECVATEENPQVYFCCCEGNFCNEKFSYFPEMEVTQPTSNPVTPKPP

SEQ ID NO: 289 - protein, 110 aa, synthetic construct
  VARIANT 18: note = Wherein X is any amino acid that is not N
ETRECIYYNANWELERTXQSGLERCEGEQDKRLHCYASWRNSSGTIELVKKGCWLDDFNCYDRQECVATEENPQVYFCCCEGNFCNEKFSYFPQMEVTQPTSNPVTPKPP

SEQ ID NO: 290 - protein, 110 aa, synthetic construct
  VARIANT 18: note = Wherein X is any amino acid that is not N
ETRECIYYNANWELERTXQSGLERCYGDKDKRRHCYASWRNSSGTIELVKKGCWLDDINCYDRTDCVEKKDSPEVYFCCCEGNFCNEKFSYFPEMEVTQPTSNPVTPKPP

SEQ ID NO: 291 - protein, 110 aa, synthetic construct
  VARIANT 18: note = Wherein X is any amino acid that is not N
ETRECIYYNANWELERTXQSGLERCYGDKDKRRHCYASWRNSSGTIELVKKGCWLDDINCYDRTDCVEKKDSPEVYFCCCEGNFCNEKFSYFPQMEVTQPTSNPVTPKPP

SEQ ID NO: 292 - protein, 110 aa, synthetic construct
  VARIANT 18: note = Wherein X is any amino acid that is not N
ETRECIYYNANWELERTXQSGLERCYGDKDKRRHCYASWRNSSGTIELVKKGCWLDDFNCYDRQECVATEENPQVYFCCCEGNFCNEKFSYFPQMEVTQPTSNPVTPKPP

SEQ ID NO: 293 - protein, 110 aa, synthetic construct
  VARIANT 18: note = Wherein X is any amino acid that is not N
ETRECIYYNANWELERTXQSGLERCYGDKDKRRHCYASWRNSSGTIELVKQGCWLDDFNCYDRQECVATEENPQVYFCCCEGNFCNEKFSYFPQMEVTQPTSNPVTPKPP

SEQ ID NO: 294 - protein, 110 aa, synthetic construct
  VARIANT 18: note = Wherein X is any amino acid that is not N
ETRECIYYNANWELERTXQSGLERCYGDKDKRRHCYASWRNSSGTIEIVKKGCWLDDFNCYDRQECVATKENPQVYFCCCEGNFCNEKFSYFPQMEVTQPTSNPVTPKPP

SEQ ID NO: 295 - protein, 110 aa, synthetic construct
  VARIANT 18: note = Wherein X is any amino acid that is not N
ETRECIYYNANWELERTXQSGLERCYGDKDKRRHCYASWRNSSGSIELVKKGCWLDDFNCYDRQECVATKENPQVYFCCCEGNFCNEKFSYFPQMEVTQPTSNPVTPKPP

SEQ ID NO: 296 - protein, 110 aa, synthetic construct
  VARIANT 18: note = Wherein X is any amino acid that is not N
ETRECIYYNANWELERTXQSGLERCEGEQDKRLHCYASWRNSSGSIELVKKGCWLDDFNCYDRQECVATEENPQVYFCCCEGNFCNEKFSYFPQMEVTQPTSNPVTPKPP

SEQ ID NO: 297 - protein, 110 aa, synthetic construct
  VARIANT 18: note = Wherein X is any amino acid that is not N
ETRECIYYNANWELERTXQSGLERCEGEQDKRLHCYASWRNSSGTIEIVKKGCWLDDFNCYDRQECVATEENPQVYFCCCEGNFCNEKFSYFPQMEVTQPTSNPVTPKPP

SEQ ID NO: 298 - protein, 110 aa, synthetic construct
  VARIANT 18: note = Wherein X is any amino acid that is not N
ETRECIYYNANWELERTXQSGLERCEGEQDKRLHCYASWRNSSGTIELVKQGCWLDDFNCYDRQECVATEENPQVYFCCCEGNFCNEKFSYFPQMEVTQPTSNPVTPKPP

SEQ ID NO: 299 - protein, 110 aa, synthetic construct
  VARIANT 18: note = Wherein X is any amino acid that is not N
ETRECIYYNANWELERTXQSGLERCEGEQDKRLHCYASWRNSSGTIELVKKGCWLDDFNCYDRQECVETEENPQVYFCCCEGNFCNEKFSYFPQMEVTQPTSNPVTPKPP

SEQ ID NO: 300 - protein, 110 aa, synthetic construct
  VARIANT 18: note = Wherein X is any amino acid that is not N
ETRECIYYNANWELERTXQSGLERCEGEQDKRLHCYASWRNSSGTIELVKKGCWLDDFNCYDRQECVAKEENPQVYFCCCEGNFCNEKFSYFPQMEVTQPTSNPVTPKPP

SEQ ID NO: 301 - protein, 110 aa, synthetic construct
  VARIANT 18: note = Wherein X is any amino acid that is not N
ETRECIYYNANWELERTXQSGLERCEGEQDKRLHCYASWRNSSGTIELVKKGCWLDDFNCYDRQECVATKENPQVYFCCCEGNFCNEKFSYFPQMEVTQPTSNPVTPKPP

SEQ ID NO: 302 - protein, 110 aa, synthetic construct
  VARIANT 18: note = Wherein X is any amino acid that is not N
ETRECIYYNANWELERTXQSGLERCEGEQDKRLHCYASWRNSSGTIELVKKGCWLDDFNCYDRQECVATEDNPQVYFCCCEGNFCNEKFSYFPQMEVTQPTSNPVTPKPP

SEQ ID NO: 303 - protein, 110 aa, synthetic construct
  VARIANT 18: note = Wherein X is any amino acid that is not N
ETRECIYYNANWELERTXQSGLERCEGEQDKRLHCYASWRNSSGTIELVKKGCWLDDFNCYDRQECVATEESPQVYFCCCEGNFCNEKFSYFPQMEVTQPTSNPVTPKPP

SEQ ID NO: 304 - protein, 110 aa, synthetic construct
  VARIANT 18: note = Wherein X is any amino acid that is not N
ETRECIYYNANWELERTXQSGLERCEGEQDKRLHCYASWRNSSGTIELVKKGCWLDDFNCYDRQECVATEENPEVYFCCCEGNFCNEKFSYFPQMEVTQPTSNPVTPKPP

SEQ ID NO: 305 - protein, 110 aa, synthetic construct
  VARIANT 18: note = Wherein X is any amino acid that is not N
ETRECIYYNANWELERTXQSGLERCEGDKDKRLHCYASWRNSSGTIELVKKGCWLDDFNCYDRQECVETEENPQVYFCCCEGNFCNEKFSYFPQMEVTQPTSNPVTPKPP

SEQ ID NO: 306 - protein, 110 aa, synthetic construct
  VARIANT 18: note = Wherein X is any amino acid that is not N
ETRECIYYNANWELERTXQSGLERCEGEKDKRLHCYASWRNSSGTIELVKKGCWLDDFNCYDRQECVAKEENPQVYFCCCEGNFCNEKFSYFPQMEVTQPTSNPVTPKPP

SEQ ID NO: 307 - protein, 110 aa, synthetic construct
  VARIANT 18: note = Wherein X is any amino acid that is not N
ETRECIYYNANWELERTXQSGLERCEGDQDKRLHCYASWRNSSGTIELVKKGCWLDDFNCYDRQECVATKENPQVYFCCCEGNFCNEKFSYFPQMEVTQPTSNPVTPKPP

SEQ ID NO: 308 - protein, 110 aa, synthetic construct
  VARIANT 18: note = Wherein X is any amino acid that is not N
ETRECIYYNANWELERTXQSGLERCEGDKDKRLHCYASWRNSSGTIELVKQGCWLDDFNCYDRQECVAKKENPQVYFCCCEGNFCNEKFSYFPQMEVTQPTSNPVTPKPP

SEQ ID NO: 309 - protein, 110 aa, synthetic construct
  VARIANT 18: note = Wherein X is any amino acid that is not N
ETRECIYYNANWELERTXQSGLERCEGDKDKRLHCYASWRNSSGTIEIVKQGCWLDDFNCYDRQECVAEKENPQVYFCCCEGNFCNEKFSYFPQMEVTQPTSNPVTPKPP

SEQ ID NO: 310 - protein, 110 aa, synthetic construct
  VARIANT 18: note = Wherein X is any amino acid that is not N
ETRECIYYNANWELERTXQSGLERCYGDQDKRLHCYASWRNSSGSIEIVKQGCWLDDFNCYDRQECVAKKENPQVYFCCCEGNFCNEKFSYFPQMEVTQPTSNPVTPKPP

SEQ ID NO: 311 - protein, 110 aa, synthetic construct
  VARIANT 18: note = Wherein X is any amino acid that is not N
ETRECIYYNANWELERTXQSGLERCEGEKDKRRHCYASWRNSSGTIEIVKKGCWLDDFNCYDRQECVATKENPQVYFCCCEGNFCNEKFSYFPQMEVTQPTSNPVTPKPP

SEQ ID NO: 312 - protein, 110 aa, synthetic construct
  VARIANT 18: note = Wherein X is any amino acid that is not N
ETRECIYYNANWELERTXQSGLERCYGDQDKRRHCYASWRNSSGTIELVKKGCWLDDFNCYDRQECVATEENPEVYFCCCEGNFCNEKFSYFPQMEVTQPTSNPVTPKPP

SEQ ID NO: 313 - protein, 110 aa, synthetic construct
  VARIANT 18: note = Wherein X is any amino acid that is not N
ETRECIYYNANWELERTXQSGLERCEGEQDKRRHCYASWRNSSGTIELVKKGCWLDDFNCYDRQECVATEENPQVYFCCCEGNFCNEKFSYFPQMEVTQPTSNPVTPKPP

SEQ ID NO: 314 - protein, 110 aa, synthetic construct
  VARIANT 18: note = Wherein X is any amino acid that is not N
ETRECIYYNANWELERTXQSGLERCYGEQDKRLHCYASWRNSSGSIEIVKKGCWLDDFNCYDRTDCVATEENPQVYFCCCEGNFCNEKFSYFPQMEVTQPTSNPVTPKPP

SEQ ID NO: 315 - protein, 110 aa, synthetic construct
  VARIANT 18: note = Wherein X is any amino acid that is not N
ETRECIYYNANWELERTXQSGLERCEGEQDKRRHCYASWRNSSGSIELVKKGCWLDDFNCYDRQECVAKEENPQVYFCCCEGNFCNEKFSYFPQMEVTQPTSNPVTPKPP

SEQ ID NO: 316 - protein, 110 aa, synthetic construct
  VARIANT 18: note = Wherein X is any amino acid that is not N
ETRECIYYNANWELERTXQSGLERCEGEQDKRRHCYASWRNSSGTIEIVKKGCWLDDFNCYDRQECVAKEENPQVYFCCCEGNFCNEKFSYFPQMEVTQPTSNPVTPKPP

SEQ ID NO: 317 - protein, 110 aa, synthetic construct
  VARIANT 18: note = Wherein X is any amino acid that is not N
ETRECIYYNANWELERTXQSGLERCEGEQDKRRHCYASWRNSSGSIEIVKKGCWLDDFNCYDRQECVATKENPQVYFCCCEGNFCNEKFSYFPQMEVTQPTSNPVTPKPP

SEQ ID NO: 318 - protein, 110 aa, synthetic construct
  VARIANT 18: note = Wherein X is any amino acid that is not N
ETRECIYYNANWELERTXQSGLERCEGDQDKRLHCYASWRNSSGTIEIVKKGCWLDDFNCYDRQECVATKENPQVYFCCCEGNFCNEKFSYFPQMEVTQPTSNPVTPKPP

SEQ ID NO: 319 - protein, 110 aa, synthetic construct
  VARIANT 18: note = Wherein X is any amino acid that is not N
ETRECIYYNANWELERTXQSGLERCEGDQDKRLHCYASWRNSSGSIELVKKGCWLDDFNCYDRQECVATKENPQVYFCCCEGNFCNEKFSYFPQMEVTQPTSNPVTPKPP

SEQ ID NO: 320 - protein, 110 aa, synthetic construct; identical to SEQ ID NO: 307
  VARIANT 18: note = Wherein X is any amino acid that is not N

SEQ ID NO: 321 - protein, 110 aa, synthetic construct
  VARIANT 18: note = Wherein X is any amino acid that is not N
ETRECIYYNANWELERTXQSGLERCEGEQDKRLHCYASWRNSSGTIEIVKKGCWLDDFNCYDRQECVATKENPQVYFCCCEGNFCNEKFSYFPQMEVTQPTSNPVTPKPP

SEQ ID NO: 322 - protein, 110 aa, synthetic construct; identical to SEQ ID NO: 301
  VARIANT 18: note = Wherein X is any amino acid that is not N

SEQ ID NO: 323 - protein, 110 aa, synthetic construct
  VARIANT 18: note = Wherein X is any amino acid that is not N
ETRECIYYNANWELERTXQSGLERCEGDQDKRLHCYASWRNSSGTIEIVKKGCWLDDFNCYDRQECVAKKENPQVYFCCCEGNFCNEKFSYFPQMEVTQPTSNPVTPKPP

SEQ ID NO: 324 - protein, 110 aa, synthetic construct
  VARIANT 18: note = Wherein X is any amino acid that is not N
ETQECLFFNANWEKDRTXQTGVEPCYGDKDKRRHCFATWKNISGSIEIVKQGCWLDDINCYDRTDCVEKKDSPEVYFCCCEGNMCNERFTHLPEAGGPEVTYEPPPTAPT

SEQ ID NO: 325 - protein, 110 aa, synthetic construct
  VARIANT 18: note = Wherein X is any amino acid that is not N
ETRECIYYNANWELERTXQSGLERCYGDKDKRRHCYASWRNSSGTIELVKKGCWLDDINCYDRQECVATKENPQVYFCCCEGNFCNERFTHLPEAGGPEVTYEPPPTAPT

SEQ ID NO: 326 - protein, 110 aa, synthetic construct
  VARIANT 20: note = Wherein X is any amino acid that is not S or T
ETRECIYYNANWELERTNQXGLERCEGEQDKRLHCYASWRNSSGTIELVKKGCWLDDFNCYDRQECVATEENPQVYFCCCEGNFCNERFTHLPEAGGPEVTYEPPPTAPT

SEQ ID NO: 327 - protein, 110 aa, synthetic construct
ETRECIYYNANWELERTNQSGLERCEGEQDKRLHCYASWRNSSGTIELVKKGCWDDDFNCYDRQECVATEENPQVYFCCCEGNFCNERFTHLPEAGGPEVTYEPPPTAPT

SEQ ID NO: 328 - protein, 110 aa, synthetic construct
  VARIANT 18: note = Wherein X is any amino acid that is not N
ETRECIYYNANWELERTXQSGLERCEGEQDKRLHCYASWRNSSGTIELVKKGCWDDDFNCYDRQECVATEENPQVYFCCCEGNFCNERFTHLPEAGGPEVTYEPPPTAPT

SEQ ID NO: 329 - protein, 110 aa, synthetic construct
ETRECIYYNANWELERTQQSGLERCEGEQDKRLHCYASWRNSSGTIELVKKGCWDDDFNCYDRQECVATEENPQVYFCCCEGNFCNERFTHLPEAGGPEVTYEPPPTAPT

SEQ ID NO: 330 - protein, 110 aa, synthetic construct
ETRECIYYNANWELERTNQSGLERCEGEQDKRLHCYASWRNSSGTIELVKKGCWEDDFNCYDRQECVATEENPQVYFCCCEGNFCNERFTHLPEAGGPEVTYEPPPTAPT

SEQ ID NO: 331 - protein, 110 aa, synthetic construct
ETRECIYYNANWELERTXQSGLERCEGEQDKRLHCYASWRNSSGTIELVKKGCWEDDFNCYDRQECVATEENPQVYFCCCEGNFCNERFTHLPEAGGPEVTYEPPPTAPT

SEQ ID NO: 332 - protein, 110 aa, synthetic construct
ETRECIYYNANWELERTQQSGLERCEGEQDKRLHCYASWRNSSGTIELVKKGCWEDDFNCYDRQECVATEENPQVYFCCCEGNFCNERFTHLPEAGGPEVTYEPPPTAPT

SEQ ID NO: 333 - protein, 110 aa, synthetic construct
ETRECIYYNANWELERTNQSGLERCEGEQDKRLHCYASWANSSGTIELVKKGCWLDDFNCYDRQECVATEENPQVYFCCCEGNFCNERFTHLPEAGGPEVTYEPPPTAPT

SEQ ID NO: 334 - protein, 110 aa, synthetic construct
  VARIANT 18: note = Wherein X is any amino acid that is not N
ETRECIYYNANWELERTXQSGLERCEGEQDKRLHCYASWANSSGTIELVKKGCWLDDFNCYDRQECVATEENPQVYFCCCEGNFCNERFTHLPEAGGPEVTYEPPPTAPT

SEQ ID NO: 335 - protein, 110 aa, synthetic construct
ETRECIYYNANWELERTQQSGLERCEGEQDKRLHCYASWANSSGTIELVKKGCWLDDFNCYDRQECVATEENPQVYFCCCEGNFCNERFTHLPEAGGPEVTYEPPPTAPT

SEQ ID NO: 336 - protein, 110 aa, synthetic construct
ETRECIYYNANWELERTAQSGLERCEGEQDKRLHCYASWRNSSGTIELVKKGCWLDDFNCYDRQECVATEENPQVYFCCCEGNFCNERFTHLPEAGGPEVTYEPPPTAPT

SEQ ID NO: 337 - protein, 110 aa, synthetic construct
ETRECIYYNANWELERTRQSGLERCEGEQDKRLHCYASWRNSSGTIELVKKGCWLDDFNCYDRQECVATEENPQVYFCCCEGNFCNERFTHLPEAGGPEVTYEPPPTAPT

SEQ ID NO: 338 - protein, 110 aa, synthetic construct
ETRECIYYNANWELERTDQSGLERCEGEQDKRLHCYASWRNSSGTIELVKKGCWLDDFNCYDRQECVATEENPQVYFCCCEGNFCNERFTHLPEAGGPEVTYEPPPTAPT

SEQ ID NO: 339 - protein, 110 aa, synthetic construct
ETRECIYYNANWELERTCQSGLERCEGEQDKRLHCYASWRNSSGTIELVKKGCWLDDFNCYDRQECVATEENPQVYFCCCEGNFCNERFTHLPEAGGPEVTYEPPPTAPT

SEQ ID NO: 340 - protein, 110 aa, synthetic construct
ETRECIYYNANWELERTEQSGLERCEGEQDKRLHCYASWRNSSGTIELVKKGCWLDDFNCYDRQECVATEENPQVYFCCCEGNFCNERFTHLPEAGGPEVTYEPPPTAPT

SEQ ID NO: 341 - protein, 110 aa, synthetic construct
ETRECIYYNANWELERTGQSGLERCEGEQDKRLHCYASWRNSSGTIELVKKGCWLDDFNCYDRQECVATEENPQVYFCCCEGNFCNERFTHLPEAGGPEVTYEPPPTAPT

SEQ ID NO: 342 - protein, 110 aa, synthetic construct
ETRECIYYNANWELERTHQSGLERCEGEQDKRLHCYASWRNSSGTIELVKKGCWLDDFNCYDRQECVATEENPQVYFCCCEGNFCNERFTHLPEAGGPEVTYEPPPTAPT

SEQ ID NO: 343 - protein, 110 aa, synthetic construct
ETRECIYYNANWELERTIQSGLERCEGEQDKRLHCYASWRNSSGTIELVKKGCWLDDFNCYDRQECVATEENPQVYFCCCEGNFCNERFTHLPEAGGPEVTYEPPPTAPT

SEQ ID NO: 344 - protein, 110 aa, synthetic construct
ETRECIYYNANWELERTLQSGLERCEGEQDKRLHCYASWRNSSGTIELVKKGCWLDDFNCYDRQECVATEENPQVYFCCCEGNFCNERFTHLPEAGGPEVTYEPPPTAPT

SEQ ID NO: 345 - protein, 110 aa, synthetic construct
ETRECIYYNANWELERTKQSGLERCEGEQDKRLHCYASWRNSSGTIELVKKGCWLDDFNCYDRQECVATEENPQVYFCCCEGNFCNERFTHLPEAGGPEVTYEPPPTAPT

SEQ ID NO: 346 - protein, 110 aa, synthetic construct
ETRECIYYNANWELERTMQSGLERCEGEQDKRLHCYASWRNSSGTIELVKKGCWLDDFNCYDRQECVATEENPQVYFCCCEGNFCNERFTHLPEAGGPEVTYEPPPTAPT

SEQ ID NO: 347 - protein, 110 aa, synthetic construct
ETRECIYYNANWELERTFQSGLERCEGEQDKRLHCYASWRNSSGTIELVKKGCWLDDFNCYDRQECVATEENPQVYFCCCEGNFCNERFTHLPEAGGPEVTYEPPPTAPT

SEQ ID NO: 348 - protein, 110 aa, synthetic construct
ETRECIYYNANWELERTPQSGLERCEGEQDKRLHCYASWRNSSGTIELVKKGCWLDDFNCYDRQECVATEENPQVYFCCCEGNFCNERFTHLPEAGGPEVTYEPPPTAPT

SEQ ID NO: 349 - protein, 110 aa, synthetic construct
ETRECIYYNANWELERTSQSGLERCEGEQDKRLHCYASWRNSSGTIELVKKGCWLDDFNCYDRQECVATEENPQVYFCCCEGNFCNERFTHLPEAGGPEVTYEPPPTAPT

SEQ ID NO: 350 - protein, 110 aa, synthetic construct
ETRECIYYNANWELERTTQSGLERCEGEQDKRLHCYASWRNSSGTIELVKKGCWLDDFNCYDRQECVATEENPQVYFCCCEGNFCNERFTHLPEAGGPEVTYEPPPTAPT

SEQ ID NO: 351 - protein, 110 aa, synthetic construct
ETRECIYYNANWELERTWQSGLERCEGEQDKRLHCYASWRNSSGTIELVKKGCWLDDFNCYDRQECVATEENPQVYFCCCEGNFCNERFTHLPEAGGPEVTYEPPPTAPT

SEQ ID NO: 352 - protein, 110 aa, synthetic construct
ETRECIYYNANWELERTYQSGLERCEGEQDKRLHCYASWRNSSGTIELVKKGCWLDDFNCYDRQECVATEENPQVYFCCCEGNFCNERFTHLPEAGGPEVTYEPPPTAPT

SEQ ID NO: 353 - protein, 110 aa, synthetic construct
ETRECIYYNANWELERTVQSGLERCEGEQDKRLHCYASWRNSSGTIELVKKGCWLDDFNCYDRQECVATEENPQVYFCCCEGNFCNERFTHLPEAGGPEVTYEPPPTAPT

SEQ ID NO: 354 - protein, 110 aa, synthetic construct; identical to SEQ ID NO: 336

SEQ ID NO: 355 - protein, 110 aa, synthetic construct
ETRECIYYNANWELERTNQAGLERCEGEQDKRLHCYASWRNSSGTIELVKKGCWLDDFNCYDRQECVATEENPQVYFCCCEGNFCNERFTHLPEAGGPEVTYEPPPTAPT

SEQ ID NO: 356 - protein, 110 aa, synthetic construct
ETRECIYYNANWELERTNQRGLERCEGEQDKRLHCYASWRNSSGTIELVKKGCWLDDFNCYDRQECVATEENPQVYFCCCEGNFCNERFTHLPEAGGPEVTYEPPPTAPT

SEQ ID NO: 357 - protein, 110 aa, synthetic construct
ETRECIYYNANWELERTNQNGLERCEGEQDKRLHCYASWRNSSGTIELVKKGCWLDDFNCYDRQECVATEENPQVYFCCCEGNFCNERFTHLPEAGGPEVTYEPPPTAPT

SEQ ID NO: 358 - protein, 110 aa, synthetic construct
ETRECIYYNANWELERTNQDGLERCEGEQDKRLHCYASWRNSSGTIELVKKGCWLDDFNCYDRQECVATEENPQVYFCCCEGNFCNERFTHLPEAGGPEVTYEPPPTAPT

SEQ ID NO: 359 - protein, 110 aa, synthetic construct
ETRECIYYNANWELERTNQCGLERCEGEQDKRLHCYASWRNSSGTIELVKKGCWLDDFNCYDRQECVATEENPQVYFCCCEGNFCNERFTHLPEAGGPEVTYEPPPTAPT

SEQ ID NO: 360 - protein, 110 aa, synthetic construct
ETRECIYYNANWELERTNQQGLERCEGEQDKRLHCYASWRNSSGTIELVKKGCWLDDFNCYDRQECVATEENPQVYFCCCEGNFCNERFTHLPEAGGPEVTYEPPPTAPT

SEQ ID NO: 361 - protein, 110 aa, synthetic construct
ETRECIYYNANWELERTNQEGLERCEGEQDKRLHCYASWRNSSGTIELVKKGCWLDDFNCYDRQECVATEENPQVYFCCCEGNFCNERFTHLPEAGGPEVTYEPPPTAPT

SEQ ID NO: 362 - protein, 110 aa, synthetic construct
ETRECIYYNANWELERTNQGGLERCEGEQDKRLHCYASWRNSSGTIELVKKGCWLDDFNCYDRQECVATEENPQVYFCCCEGNFCNERFTHLPEAGGPEVTYEPPPTAPT

SEQ ID NO: 363 - protein, 110 aa, synthetic construct
ETRECIYYNANWELERTNQHGLERCEGEQDKRLHCYASWRNSSGTIELVKKGCWLDDFNCYDRQECVATEENPQVYFCCCEGNFCNERFTHLPEAGGPEVTYEPPPTAPT

SEQ ID NO: 364 - protein, 110 aa, synthetic construct
ETRECIYYNANWELERTNQIGLERCEGEQDKRLHCYASWRNSSGTIELVKKGCWLDDFNCYDRQECVATEENPQVYFCCCEGNFCNERFTHLPEAGGPEVTYEPPPTAPT

SEQ ID NO: 365 - protein, 110 aa, synthetic construct
ETRECIYYNANWELERTNQLGLERCEGEQDKRLHCYASWRNSSGTIELVKKGCWLDDFNCYDRQECVATEENPQVYFCCCEGNFCNERFTHLPEAGGPEVTYEPPPTAPT

SEQ ID NO: 366 - protein, 110 aa, synthetic construct
ETRECIYYNANWELERTNQKGLERCEGEQDKRLHCYASWRNSSGTIELVKKGCWLDDFNCYDRQECVATEENPQVYFCCCEGNFCNERFTHLPEAGGPEVTYEPPPTAPT

SEQ ID NO: 367 - protein, 110 aa, synthetic construct
ETRECIYYNANWELERTNQMGLERCEGEQDKRLHCYASWRNSSGTIELVKKGCWLDDFNCYDRQECVATEENPQVYFCCCEGNFCNERFTHLPEAGGPEVTYEPPPTAPT

SEQ ID NO: 368 - protein, 110 aa, synthetic construct
ETRECIYYNANWELERTNQFGLERCEGEQDKRLHCYASWRNSSGTIELVKKGCWLDDFNCYDRQECVATEENPQVYFCCCEGNFCNERFTHLPEAGGPEVTYEPPPTAPT

SEQ ID NO: 369 - protein, 110 aa, synthetic construct
ETRECIYYNANWELERTNQPGLERCEGEQDKRLHCYASWRNSSGTIELVKKGCWLDDFNCYDRQECVATEENPQVYFCCCEGNFCNERFTHLPEAGGPEVTYEPPPTAPT

SEQ ID NO: 370 - protein, 110 aa, synthetic construct
ETRECIYYNANWELERTNQWGLERCEGEQDKRLHCYASWRNSSGTIELVKKGCWLDDFNCYDRQECVATEENPQVYFCCCEGNFCNERFTHLPEAGGPEVTYEPPPTAPT

SEQ ID NO: 371 - protein, 110 aa, synthetic construct
ETRECIYYNANWELERTNQYGLERCEGEQDKRLHCYASWRNSSGTIELVKKGCWLDDFNCYDRQECVATEENPQVYFCCCEGNFCNERFTHLPEAGGPEVTYEPPPTAPT

SEQ ID NO: 372 - protein, 110 aa, synthetic construct
ETRECIYYNANWELERTNQVGLERCEGEQDKRLHCYASWRNSSGTIELVKKGCWLDDFNCYDRQECVATEENPQVYFCCCEGNFCNERFTHLPEAGGPEVTYEPPPTAPT

SEQ ID NO: 373 - protein, 110 aa, synthetic construct
  VARIANT 20: note = Wherein X is any amino acid that is not S or T
ETRECIYYNANWELERTNQXGLERCEGEQDKRLHCYASWRNSSGTIELVKKGCWDDDFNCYDRQECVATEENPQVYFCCCEGNFCNERFTHLPEAGGPEVTYEPPPTAPT

SEQ ID NO: 374 - protein, 110 aa, synthetic construct
  VARIANT 20: note = Wherein X is any amino acid that is not S or T
ETRECIYYNANWELERTNQXGLERCEGEQDKRLHCYASWRNSSGTIELVKKGCWEDDFNCYDRQECVATEENPQVYFCCCEGNFCNERFTHLPEAGGPEVTYEPPPTAPT

SEQ ID NO: 375 - protein, 110 aa, synthetic construct
  VARIANT 20: note = Wherein X is any amino acid that is not S or T
ETRECIYYNANWELERTNQXGLERCEGEQDKRLHCYASWANSSGTIELVKKGCWLDDFNCYDRQECVATEENPQVYFCCCEGNFCNERFTHLPEAGGPEVTYEPPPTAPT

SEQ ID NO: 376 - protein, 343 aa, synthetic construct
ETRECIYYNANWELERTNQSGLERCEGDQDKRLHCYASWRNSSGTIELVKKGCWLDDINCYDRQECVATKENPQVYFCCCEGNFCNERFTHLPEAGGPEVTYEPPPTAPTGGGGSESKYGPPCPPCPAPEFLGGPSVFLFPPKPKDTLMISRTPEVTCVVVDVSQEDPEVQFNWYVDGVEVHNAKTKPREEQFNSTYRVVSVLTVLHQDWLNGKEYKCKVSNKGLPSSIEKTISKAKGQPREPQVYTLPPSQEEMTKNQVSLTCLVKGFYPSDIAVEWESNGQPENNYKTTPPVLDSDGSFFLYSRLTVDKSRWQEGNVFSCSVMHEALHNHYTQKSLSLSLG

SEQ ID NO: 377 - protein, 111 aa, synthetic construct
AETRECIYYNANWELERTNQSGLERCEGEQDKRLHCYASWRNSSGTIELVKKGCWLDDFNCYDRQECVATEENPQVYFCCCEGNFCNERFTHLPEAGGPEVTYEPPPTAPT

SEQ ID NO: 378 - protein, 112 aa, synthetic construct
EAETRECIYYNANWELERTNQSGLERCEGEQDKRLHCYASWRNSSGTIELVKKGCWLDDFNCYDRQECVATEENPQVYFCCCEGNFCNERFTHLPEAGGPEVTYEPPPTAPT

SEQ ID NO: 379 - protein, 113 aa, synthetic construct
GEAETRECIYYNANWELERTNQSGLERCEGEQDKRLHCYASWRNSSGTIELVKKGCWLDDFNCYDRQECVATEENPQVYFCCCEGNFCNERFTHLPEAGGPEVTYEPPPTAPT

SEQ ID NO: 380 - protein, 114 aa, synthetic construct
RGEAETRECIYYNANWELERTNQSGLERCEGEQDKRLHCYASWRNSSGTIELVKKGCWLDDFNCYDRQECVATEENPQVYFCCCEGNFCNERFTHLPEAGGPEVTYEPPPTAPT

SEQ ID NO: 381 - protein, 115 aa, synthetic construct
GRGEAETRECIYYNANWELERTNQSGLERCEGEQDKRLHCYASWRNSSGTIELVKKGCWLDDFNCYDRQECVATEENPQVYFCCCEGNFCNERFTHLPEAGGPEVTYEPPPTAPT

SEQ ID NO: 382 - protein, 111 aa, synthetic construct
AETRECIYYNANWELERTQQSGLERCEGEQDKRLHCYASWRNSSGTIELVKKGCWLDDFNCYDRQECVATEENPQVYFCCCEGNFCNERFTHLPEAGGPEVTYEPPPTAPT

SEQ ID NO: 383 - protein, 112 aa, synthetic construct
EAETRECIYYNANWELERTQQSGLERCEGEQDKRLHCYASWRNSSGTIELVKKGCWLDDFNCYDRQECVATEENPQVYFCCCEGNFCNERFTHLPEAGGPEVTYEPPPTAPT

SEQ ID NO: 384 - protein, 113 aa, synthetic construct
GEAETRECIYYNANWELERTQQSGLERCEGEQDKRLHCYASWRNSSGTIELVKKGCWLDDFNCYDRQECVATEENPQVYFCCCEGNFCNERFTHLPEAGGPEVTYEPPPTAPT

SEQ ID NO: 385 - protein, 114 aa, synthetic construct
RGEAETRECIYYNANWELERTQQSGLERCEGEQDKRLHCYASWRNSSGTIELVKKGCWLDDFNCYDRQECVATEENPQVYFCCCEGNFCNERFTHLPEAGGPEVTYEPPPTAPT

SEQ ID NO: 386 - protein, 115 aa, synthetic construct
GRGEAETRECIYYNANWELERTQQSGLERCEGEQDKRLHCYASWRNSSGTIELVKKGCWLDDFNCYDRQECVATEENPQVYFCCCEGNFCNERFTHLPEAGGPEVTYEPPPTAPT

SEQ ID NO: 387 - protein, 116 aa, synthetic construct
SGRGEAETRECIYYNANWELERTQQSGLERCEGEQDKRLHCYASWRNSSGTIELVKKGCWLDDFNCYDRQECVATEENPQVYFCCCEGNFCNERFTHLPEAGGPEVTYEPPPTAPT

SEQ ID NO: 388 - protein, 112 aa, synthetic construct
EAETRECIYYNANWELERTNQSGLERCYGDKDKRRHCYASWRNSSGTIELVKKGCWLDDINCYDRTDCVEKKDSPEVYFCCCEGNFCNERFTHLPEAGGPEVTYEPPPTAPT

SEQ ID NO: 389 - protein, 113 aa, synthetic construct
GEAETRECIYYNANWELERTNQSGLERCYGDKDKRRHCYASWRNSSGTIELVKKGCWLDDINCYDRTDCVEKKDSPEVYFCCCEGNFCNERFTHLPEAGGPEVTYEPPPTAPT

SEQ ID NO: 390 - protein, 114 aa, synthetic construct
RGEAETRECIYYNANWELERTNQSGLERCYGDKDKRRHCYASWRNSSGTIELVKKGCWLDDINCYDRTDCVEKKDSPEVYFCCCEGNFCNERFTHLPEAGGPEVTYEPPPTAPT

SEQ ID NO: 391 - protein, 115 aa, synthetic construct
GRGEAETRECIYYNANWELERTNQSGLERCYGDKDKRRHCYASWRNSSGTIELVKKGCWLDDINCYDRTDCVEKKDSPEVYFCCCEGNFCNERFTHLPEAGGPEVTYEPPPTAPT

SEQ ID NO: 392 - protein, 116 aa, synthetic construct
SGRGEAETRECIYYNANWELERTNQSGLERCYGDKDKRRHCYASWRNSSGTIELVKKGCWLDDINCYDRTDCVEKKDSPEVYFCCCEGNFCNERFTHLPEAGGPEVTYEPPPTAPT

SEQ ID NO: 393 - protein, 111 aa, synthetic construct
AETRECIYYNANWELERTNQSGLERCYGDKDKRRHCYASWRNSSGTIELVKKGCWLDDFNCYDRTDCVEKKDSPEVYFCCCEGNFCNERFTHLPEAGGPEVTYEPPPTAPT

SEQ ID NO: 394 - protein, 112 aa, synthetic construct
EAETRECIYYNANWELERTNQSGLERCYGDKDKRRHCYASWRNSSGTIELVKKGCWLDDFNCYDRTDCVEKKDSPEVYFCCCEGNFCNERFTHLPEAGGPEVTYEPPPTAPT

SEQ ID NO: 395 - protein, 113 aa, synthetic construct
GEAETRECIYYNANWELERTNQSGLERCYGDKDKRRHCYASWRNSSGTIELVKKGCWLDDFNCYDRTDCVEKKDSPEVYFCCCEGNFCNERFTHLPEAGGPEVTYEPPPTAPT

SEQ ID NO: 396 - protein, 114 aa, synthetic construct
RGEAETRECIYYNANWELERTNQSGLERCYGDKDKRRHCYASWRNSSGTIELVKKGCWLDDFNCYDRTDCVEKKDSPEVYFCCCEGNFCNERFTHLPEAGGPEVTYEPPPTAPT

SEQ ID NO: 397 - protein, 115 aa, synthetic construct
GRGEAETRECIYYNANWELERTNQSGLERCYGDKDKRRHCYASWRNSSGTIELVKKGCWLDDFNCYDRTDCVEKKDSPEVYFCCCEGNFCNERFTHLPEAGGPEVTYEPPPTAPT

SEQ ID NO: 398 - protein, 116 aa, synthetic construct
SGRGEAETRECIYYNANWELERTNQSGLERCYGDKDKRRHCYASWRNSSGTIELVKKGCWLDDFNCYDRTDCVEKKDSPEVYFCCCEGNFCNERFTHLPEAGGPEVTYEPPPTAPT

SEQ ID NO: 399 - protein, 111 aa, synthetic construct
AETRECIYYNANWELERTNQSGLERCEGEQDKRLHCYASWRNSSGTIELVKKGCWLDDINCYDRTDCVEKKDSPEVYFCCCEGNFCNERFTHLPEAGGPEVTYEPPPTAPT

SEQ ID NO: 400 - protein, 112 aa, synthetic construct
EAETRECIYYNANWELERTNQSGLERCEGEQDKRLHCYASWRNSSGTIELVKKGCWLDDINCYDRTDCVEKKDSPEVYFCCCEGNFCNERFTHLPEAGGPEVTYEPPPTAPT

SEQ ID NO: 401 - protein, 113 aa, synthetic construct
GEAETRECIYYNANWELERTNQSGLERCEGEQDKRLHCYASWRNSSGTIELVKKGCWLDDINCYDRTDCVEKKDSPEVYFCCCEGNFCNERFTHLPEAGGPEVTYEPPPTAPT

SEQ ID NO: 402 - protein, 114 aa, synthetic construct
RGEAETRECIYYNANWELERTNQSGLERCEGEQDKRLHCYASWRNSSGTIELVKKGCWLDDINCYDRTDCVEKKDSPEVYFCCCEGNFCNERFTHLPEAGGPEVTYEPPPTAPT

SEQ ID NO: 403 - protein, 115 aa, synthetic construct
GRGEAETRECIYYNANWELERTNQSGLERCEGEQDKRLHCYASWRNSSGTIELVKKGCWLDDINCYDRTDCVEKKDSPEVYFCCCEGNFCNERFTHLPEAGGPEVTYEPPPTAPT

SEQ ID NO: 404 - protein, 116 aa, synthetic construct
SGRGEAETRECIYYNANWELERTNQSGLERCEGEQDKRLHCYASWRNSSGTIELVKKGCWLDDINCYDRTDCVEKKDSPEVYFCCCEGNFCNERFTHLPEAGGPEVTYEPPPTAPT

SEQ ID NO: 405 - protein, 111 aa, synthetic construct
AETRECIYYNANWELERTNQSGLERCEGEQDKRLHCYASWRNSSGTIELVKKGCWLDDINCYDRTDCVEKKDSPQVYFCCCEGNFCNERFTHLPEAGGPEVTYEPPPTAPT

SEQ ID NO: 406 - protein, 112 aa, synthetic construct
EAETRECIYYNANWELERTNQSGLERCEGEQDKRLHCYASWRNSSGTIELVKKGCWLDDINCYDRTDCVEKKDSPQVYFCCCEGNFCNERFTHLPEAGGPEVTYEPPPTAPT

SEQ ID NO: 407 - protein, 113 aa, synthetic construct
GEAETRECIYYNANWELERTNQSGLERCEGEQDKRLHCYASWRNSSGTIELVKKGCWLDDINCYDRTDCVEKKDSPQVYFCCCEGNFCNERFTHLPEAGGPEVTYEPPPTAPT

SEQ ID NO: 408 - protein, 114 aa, synthetic construct
RGEAETRECIYYNANWELERTNQSGLERCEGEQDKRLHCYASWRNSSGTIELVKKGCWLDDINCYDRTDCVEKKDSPQVYFCCCEGNFCNERFTHLPEAGGPEVTYEPPPTAPT

SEQ ID NO: 409 - protein, 115 aa, synthetic construct
GRGEAETRECIYYNANWELERTNQSGLERCEGEQDKRLHCYASWRNSSGTIELVKKGCWLDDINCYDRTDCVEKKDSPQVYFCCCEGNFCNERFTHLPEAGGPEVTYEPPPTAPT

SEQ ID NO: 410 - protein, 116 aa, synthetic construct
SGRGEAETRECIYYNANWELERTNQSGLERCEGEQDKRLHCYASWRNSSGTIELVKKGCWLDDINCYDRTDCVEKKDSPQVYFCCCEGNFCNERFTHLPEAGGPEVTYEPPPTAPT

SEQ ID NO: 411 - protein, 111 aa, synthetic construct
AETRECIYYNANWELERTNQSGLERCEGEQDKRLHCYASWRNSSGTIELVKKGCWLDDFNCYDRTDCVEKKDSPQVYFCCCEGNFCNERFTHLPEAGGPEVTYEPPPTAPT

SEQ ID NO: 412 - protein, 112 aa, synthetic construct
EAETRECIYYNANWELERTNQSGLERCEGEQDKRLHCYASWRNSSGTIELVKKGCWLDDFNCYDRTDCVEKKDSPQVYFCCCEGNFCNERFTHLPEAGGPEVTYEPPPTAPT

SEQ ID NO: 413 - protein, 113 aa, synthetic construct
GEAETRECIYYNANWELERTNQSGLERCEGEQDKRLHCYASWRNSSGTIELVKKGCWLDDFNCYDRTDCVEKKDSPQVYFCCCEGNFCNERFTHLPEAGGPEVTYEPPPTAPT

SEQ ID NO: 414 - protein, 114 aa, synthetic construct
RGEAETRECIYYNANWELERTNQSGLERCEGEQDKRLHCYASWRNSSGTIELVKKGCWLDDFNCYDRTDCVEKKDSPQVYFCCCEGNFCNERFTHLPEAGGPEVTYEPPPTAPT

SEQ ID NO: 415 - protein, 115 aa, synthetic construct
GRGEAETRECIYYNANWELERTNQSGLERCEGEQDKRLHCYASWRNSSGTIELVKKGCWLDDFNCYDRTDCVEKKDSPQVYFCCCEGNFCNERFTHLPEAGGPEVTYEPPPTAPT

SEQ ID NO: 416 - protein, 116 aa, synthetic construct
SGRGEAETRECIYYNANWELERTNQSGLERCEGEQDKRLHCYASWRNSSGTIELVKKGCWLDDFNCYDRTDCVEKKDSPQVYFCCCEGNFCNERFTHLPEAGGPEVTYEPPPTAPT

SEQ ID NO: 417 - protein, 111 aa, synthetic construct
AETRECIYYNANWELERTNQSGLERCEGEQDKRLHCYASWRNSSGTIELVKKGCWLDDFNCYDRTDCVEKKDSPEVYFCCCEGNFCNERFTHLPEAGGPEVTYEPPPTAPT

SEQ ID NO: 418 - protein, 112 aa, synthetic construct
EAETRECIYYNANWELERTNQSGLERCEGEQDKRLHCYASWRNSSGTIELVKKGCWLDDFNCYDRTDCVEKKDSPEVYFCCCEGNFCNERFTHLPEAGGPEVTYEPPPTAPT

SEQ ID NO: 419 - protein, 113 aa, synthetic construct
GEAETRECIYYNANWELERTNQSGLERCEGEQDKRLHCYASWRNSSGTIELVKKGCWLDDFNCYDRTDCVEKKDSPEVYFCCCEGNFCNERFTHLPEAGGPEVTYEPPPTAPT

SEQ ID NO: 420 - protein, 114 aa, synthetic construct
RGEAETRECIYYNANWELERTNQSGLERCEGEQDKRLHCYASWRNSSGTIELVKKGCWLDDFNCYDRTDCVEKKDSPEVYFCCCEGNFCNERFTHLPEAGGPEVTYEPPPTAPT

SEQ ID NO: 421 - protein, 115 aa, synthetic construct
GRGEAETRECIYYNANWELERTNQSGLERCEGEQDKRLHCYASWRNSSGTIELVKKGCWLDDFNCYDRTDCVEKKDSPEVYFCCCEGNFCNERFTHLPEAGGPEVTYEPPPTAPT

SEQ ID NO: 422 - protein, 116 aa, synthetic construct
SGRGEAETRECIYYNANWELERTNQSGLERCEGEQDKRLHCYASWRNSSGTIELVKKGCWLDDFNCYDRTDCVEKKDSPEVYFCCCEGNFCNERFTHLPEAGGPEVTYEPPPTAPT

SEQ ID NO: 423 - protein, 111 aa, synthetic construct
AETRECIYYNANWELERTNQSGLERCEGEQDKRLHCYASWRNSSGTIELVKKGCWLDDFNCYDRQECVEKKDSPEVYFCCCEGNFCNERFTHLPEAGGPEVTYEPPPTAPT

SEQ ID NO: 424 - protein, 112 aa, synthetic construct
EAETRECIYYNANWELERTNQSGLERCEGEQDKRLHCYASWRNSSGTIELVKKGCWLDDFNCYDRQECVEKKDSPEVYFCCCEGNFCNERFTHLPEAGGPEVTYEPPPTAPT

SEQ ID NO: 425 - protein, 113 aa, synthetic construct
GEAETRECIYYNANWELERTNQSGLERCEGEQDKRLHCYASWRNSSGTIELVKKGCWLDDFNCYDRQECVEKKDSPEVYFCCCEGNFCNERFTHLPEAGGPEVTYEPPPTAPT

SEQ ID NO: 426 - protein, 114 aa, synthetic construct
RGEAETRECIYYNANWELERTNQSGLERCEGEQDKRLHCYASWRNSSGTIELVKKGCWLDDFNCYDRQECVEKKDSPEVYFCCCEGNFCNERFTHLPEAGGPEVTYEPPPTAPT

SEQ ID NO: 427 - protein, 115 aa, synthetic construct
GRGEAETRECIYYNANWELERTNQSGLERCEGEQDKRLHCYASWRNSSGTIELVKKGCWLDDFNCYDRQECVEKKDSPEVYFCCCEGNFCNERFTHLPEAGGPEVTYEPPPTAPT

SEQ ID NO: 428 - protein, 116 aa, synthetic construct
SGRGEAETRECIYYNANWELERTNQSGLERCEGEQDKRLHCYASWRNSSGTIELVKKGCWLDDFNCYDRQECVEKKDSPEVYFCCCEGNFCNERFTHLPEAGGPEVTYEPPPTAPT

SEQ ID NO: 429 - protein, 111 aa, synthetic construct
AETRECIYYNANWELERTNQSGLERCEGEQDKRLHCYASWRNSSGTIELVKKGCWLDDFNCYDRQECVEKKDSPQVYFCCCEGNFCNERFTHLPEAGGPEVTYEPPPTAPT

SEQ ID NO: 430 - protein, 112 aa, synthetic construct
EAETRECIYYNANWELERTNQSGLERCEGEQDKRLHCYASWRNSSGTIELVKKGCWLDDFNCYDRQECVEKKDSPQVYFCCCEGNFCNERFTHLPEAGGPEVTYEPPPTAPT

SEQ ID NO: 431 - protein, 113 aa, synthetic construct
GEAETRECIYYNANWELERTNQSGLERCEGEQDKRLHCYASWRNSSGTIELVKKGCWLDDFNCYDRQECVEKKDSPQVYFCCCEGNFCNERFTHLPEAGGPEVTYEPPPTAPT

SEQ ID NO: 432 - protein, 114 aa, synthetic construct
RGEAETRECIYYNANWELERTNQSGLERCEGEQDKRLHCYASWRNSSGTIELVKKGCWLDDFNCYDRQECVEKKDSPQVYFCCCEGNFCNERFTHLPEAGGPEVTYEPPPTAPT

SEQ ID NO: 433 - protein, 115 aa, synthetic construct
GRGEAETRECIYYNANWELERTNQSGLERCEGEQDKRLHCYASWRNSSGTIELVKKGCWLDDFNCYDRQECVEKKDSPQVYFCCCEGNFCNERFTHLPEAGGPEVTYEPPPTAPT

SEQ ID NO: 434 - protein, 116 aa, synthetic construct
SGRGEAETRECIYYNANWELERTNQSGLERCEGEQDKRLHCYASWRNSSGTIELVKKGCWLDDFNCYDRQECVEKKDSPQVYFCCCEGNFCNERFTHLPEAGGPEVTYEPPPTAPT

SEQ ID NO: 435 - protein, 110 aa, synthetic construct
ATRECIYYNANWELERTNQSGLERCEGEQDKRLHCYASWRNSSGTIELVKKGCWLDDINCYDRQECVEKKDSPEVYFCCCEGNFCNERFTHLPEAGGPEVTYEPPPTAPT

SEQ ID NO: 436 - protein, 111 aa, synthetic construct
EATRECIYYNANWELERTNQSGLERCEGEQDKRLHCYASWRNSSGTIELVKKGCWLDDINCYDRQECVEKKDSPEVYFCCCEGNFCNERFTHLPEAGGPEVTYEPPPTAPT

SEQ ID NO: 437 - protein, 112 aa, synthetic construct
GEATRECIYYNANWELERTNQSGLERCEGEQDKRLHCYASWRNSSGTIELVKKGCWLDDINCYDRQECVEKKDSPEVYFCCCEGNFCNERFTHLPEAGGPEVTYEPPPTAPT

SEQ ID NO: 438 - protein, 113 aa, synthetic construct
RGEATRECIYYNANWELERTNQSGLERCEGEQDKRLHCYASWRNSSGTIELVKKGCWLDDINCYDRQECVEKKDSPEVYFCCCEGNFCNERFTHLPEAGGPEVTYEPPPTAPT

SEQ ID NO: 439 - protein, 114 aa, synthetic construct
GRGEATRECIYYNANWELERTNQSGLERCEGEQDKRLHCYASWRNSSGTIELVKKGCWLDDINCYDRQECVEKKDSPEVYFCCCEGNFCNERFTHLPEAGGPEVTYEPPPTAPT

SEQ ID NO: 440 - protein, 115 aa, synthetic construct
SGRGEATRECIYYNANWELERTNQSGLERCEGEQDKRLHCYASWRNSSGTIELVKKGCWLDDINCYDRQECVEKKDSPEVYFCCCEGNFCNERFTHLPEAGGPEVTYEPPPTAPT

SEQ ID NO: 441 - protein, 111 aa, synthetic construct
AETRECIYYNANWELERTNQSGLERCEGEQDKRLHCYASWRNSSGTIELVKKGCWLDDFNCYDRTDCVEKKDSPEVYFCCCEGNMCNERFTHLPEAGGPEVTYEPPPTAPT

SEQ ID NO: 442 - protein, 112 aa, synthetic construct
EAETRECIYYNANWELERTNQSGLERCEGEQDKRLHCYASWRNSSGTIELVKKGCWLDDFNCYDRTDCVEKKDSPEVYFCCCEGNMCNERFTHLPEAGGPEVTYEPPPTAPT

SEQ ID NO: 443 - protein, 113 aa, synthetic construct
GEAETRECIYYNANWELERTNQSGLERCEGEQDKRLHCYASWRNSSGTIELVKKGCWLDDFNCYDRTDCVEKKDSPEVYFCCCEGNMCNERFTHLPEAGGPEVTYEPPPTAPT

SEQ ID NO: 444 - protein, 114 aa, synthetic construct
RGEAETRECIYYNANWELERTNQSGLERCEGEQDKRLHCYASWRNSSGTIELVKKGCWLDDFNCYDRTDCVEKKDSPEVYFCCCEGNMCNERFTHLPEAGGPEVTYEPPPTAPT

SEQ ID NO: 445 - protein, 115 aa, synthetic construct
GRGEAETRECIYYNANWELERTNQSGLERCEGEQDKRLHCYASWRNSSGTIELVKKGCWLDDFNCYDRTDCVEKKDSPEVYFCCCEGNMCNERFTHLPEAGGPEVTYEPPPTAPT

SEQ ID NO: 446 - protein, 116 aa, synthetic construct
SGRGEAETRECIYYNANWELERTNQSGLERCEGEQDKRLHCYASWRNSSGTIELVKKGCWLDDFNCYDRTDCVEKKDSPEVYFCCCEGNMCNERFTHLPEAGGPEVTYEPPPTAPT

SEQ ID NO: 447 - protein, 111 aa, synthetic construct
AETRECIYYNANWELERTNQSGLERCEGDQDKRLHCYASWRNSSGTIELVKKGCWLDDFNCYDRQECVEKKDSPEVYFCCCEGNMCNERFTHLPEAGGPEVTYEPPPTAPT

SEQ ID NO: 448 - protein, 112 aa, synthetic construct
EAETRECIYYNANWELERTNQSGLERCEGDQDKRLHCYASWRNSSGTIELVKKGCWLDDFNCYDRQECVEKKDSPEVYFCCCEGNMCNERFTHLPEAGGPEVTYEPPPTAPT

SEQ ID NO: 449 - protein, 113 aa, synthetic construct
GEAETRECIYYNANWELERTNQSGLERCEGDQDKRLHCYASWRNSSGTIELVKKGCWLDDFNCYDRQECVEKKDSPEVYFCCCEGNMCNERFTHLPEAGGPEVTYEPPPTAPT

SEQ ID NO: 450 - protein, 114 aa, synthetic construct
RGEAETRECIYYNANWELERTNQSGLERCEGDQDKRLHCYASWRNSSGTIELVKKGCWLDDFNCYDRQECVEKKDSPEVYFCCCEGNMCNERFTHLPEAGGPEVTYEPPPTAPT

SEQ ID NO: 451 - protein, 115 aa, synthetic construct
GRGEAETRECIYYNANWELERTNQSGLERCEGDQDKRLHCYASWRNSSGTIELVKKGCWLDDFNCYDRQECVEKKDSPEVYFCCCEGNMCNERFTHLPEAGGPEVTYEPPPTAPT

SEQ ID NO: 452 - protein, 116 aa, synthetic construct
SGRGEAETRECIYYNANWELERTNQSGLERCEGDQDKRLHCYASWRNSSGTIELVKKGCWLDDFNCYDRQECVEKKDSPEVYFCCCEGNMCNERFTHLPEAGGPEVTYEPPPTAPT

SEQ ID NO: 453 - protein, 111 aa, synthetic construct
AETQECIYYNANWEKDRTNQTGVEPCYGDKDKRRHCYASWRNSSGTIELVKKGCWLDDFNCYDRQECVATEENPQVYFCCCEGNFCNERFTHLPEAGGPEVTYEPPPTAPT

SEQ ID NO: 454 - protein, 112 aa, synthetic construct
EAETQECIYYNANWEKDRTNQTGVEPCYGDKDKRRHCYASWRNSSGTIELVKKGCWLDDFNCYDRQECVATEENPQVYFCCCEGNFCNERFTHLPEAGGPEVTYEPPPTAPT

SEQ ID NO: 455 - protein, 113 aa, synthetic construct
GEAETQECIYYNANWEKDRTNQTGVEPCYGDKDKRRHCYASWRNSSGTIELVKKGCWLDDFNCYDRQECVATEENPQVYFCCCEGNFCNERFTHLPEAGGPEVTYEPPPTAPT

SEQ ID NO: 456 - protein, 114 aa, synthetic construct
RGEAETQECIYYNANWEKDRTNQTGVEPCYGDKDKRRHCYASWRNSSGTIELVKKGCWLDDFNCYDRQECVATEENPQVYFCCCEGNFCNERFTHLPEAGGPEVTYEPPPTAPT

SEQ ID NO: 457 - protein, 115 aa, synthetic construct
GRGEAETQECIYYNANWEKDRTNQTGVEPCYGDKDKRRHCYASWRNSSGTIELVKKGCWLDDFNCYDRQECVATEENPQVYFCCCEGNFCNERFTHLPEAGGPEVTYEPPPTAPT

SEQ ID NO: 458 - protein, 116 aa, synthetic construct
SGRGEAETQECIYYNANWEKDRTNQTGVEPCYGDKDKRRHCYASWRNSSGTIELVKKGCWLDDFNCYDRQECVATEENPQVYFCCCEGNFCNERFTHLPEAGGPEVTYEPPPTAPT

SEQ ID NO: 459 - protein, 111 aa, synthetic construct
AETQECIYYNANWEKDRTNQTGVEPCEGDQDKRLHCYASWRNSSGTIELVKKGCWLDDFNCYDRQECVATEENPQVYFCCCEGNFCNERFTHLPEAGGPEVTYEPPPTAPT

SEQ ID NO: 460 - protein, 112 aa, synthetic construct
EAETQECIYYNANWEKDRTNQTGVEPCEGDQDKRLHCYASWRNSSGTIELVKKGCWLDDFNCYDRQECVATEENPQVYFCCCEGNFCNERFTHLPEAGGPEVTYEPPPTAPT

SEQ ID NO: 461 - protein, 113 aa, synthetic construct
GEAETQECIYYNANWEKDRTNQTGVEPCEGDQDKRLHCYASWRNSSGTIELVKKGCWLDDFNCYDRQECVATEENPQVYFCCCEGNFCNERFTHLPEAGGPEVTYEPPPTAPT

SEQ ID NO: 462 - protein, 114 aa, synthetic construct
RGEAETQECIYYNANWEKDRTNQTGVEPCEGDQDKRLHCYASWRNSSGTIELVKKGCWLDDFNCYDRQECVATEENPQVYFCCCEGNFCNERFTHLPEAGGPEVTYEPPPTAPT

SEQ ID NO: 463 - protein, 115 aa, synthetic construct
GRGEAETQECIYYNANWEKDRTNQTGVEPCEGDQDKRLHCYASWRNSSGTIELVKKGCWLDDFNCYDRQECVATEENPQVYFCCCEGNFCNERFTHLPEAGGPEVTYEPPPTAPT

SEQ ID NO: 464 - protein, 116 aa, synthetic construct
SGRGEAETQECIYYNANWEKDRTNQTGVEPCEGDQDKRLHCYASWRNSSGTIELVKKGCWLDDFNCYDRQECVATEENPQVYFCCCEGNFCNERFTHLPEAGGPEVTYEPPPTAPT

SEQ ID NO: 465 - protein, 111 aa, synthetic construct
AETRECIYYNANWELERTNQSGLERCYGDKDKRRHCYASWRNSSGTIELVKKGCWLDDFNCYDRQECVATEENPQVYFCCCEGNFCNERFTHLPEAGGPEVTYEPPPTAPT

SEQ ID NO: 466 - protein, 112 aa, synthetic construct
EAETRECIYYNANWELERTNQSGLERCYGDKDKRRHCYASWRNSSGTIELVKKGCWLDDFNCYDRQECVATEENPQVYFCCCEGNFCNERFTHLPEAGGPEVTYEPPPTAPT

SEQ ID NO: 467 - protein, 113 aa, synthetic construct
GEAETRECIYYNANWELERTNQSGLERCYGDKDKRRHCYASWRNSSGTIELVKKGCWLDDFNCYDRQECVATEENPQVYFCCCEGNFCNERFTHLPEAGGPEVTYEPPPTAPT

SEQ ID NO: 468 - protein, 114 aa, synthetic construct
RGEAETRECIYYNANWELERTNQSGLERCYGDKDKRRHCYASWRNSSGTIELVKKGCWLDDFNCYDRQECVATEENPQVYFCCCEGNFCNERFTHLPEAGGPEVTYEPPPTAPT

SEQ ID NO: 469 - protein, 115 aa, synthetic construct
GRGEAETRECIYYNANWELERTNQSGLERCYGDKDKRRHCYASWRNSSGTIELVKKGCWLDDFNCYDRQECVATEENPQVYFCCCEGNFCNERFTHLPEAGGPEVTYEPPPTAPT

SEQ ID NO: 470 - protein, 116 aa, synthetic construct
SGRGEAETRECIYYNANWELERTNQSGLERCYGDKDKRRHCYASWRNSSGTIELVKKGCWLDDFNCYDRQECVATEENPQVYFCCCEGNFCNERFTHLPEAGGPEVTYEPPPTAPT

SEQ ID NO: 471 - protein, 111 aa, synthetic construct
AETRECIYYNANWEKDRTNQTGVEPCEGDQDKRLHCYASWRNSSGTIELVKKGCWLDDFNCYDRQECVATEENPQVYFCCCEGNFCNERFTHLPEAGGPEVTYEPPPTAPT

SEQ ID NO: 472 - protein, 112 aa, synthetic construct
EAETRECIYYNANWEKDRTNQTGVEPCEGDQDKRLHCYASWRNSSGTIELVKKGCWLDDFNCYDRQECVATEENPQVYFCCCEGNFCNERFTHLPEAGGPEVTYEPPPTAPT

SEQ ID NO: 473 - protein, 113 aa, synthetic construct
GEAETRECIYYNANWEKDRTNQTGVEPCEGDQDKRLHCYASWRNSSGTIELVKKGCWLDDFNCYDRQECVATEENPQVYFCCCEGNFCNERFTHLPEAGGPEVTYEPPPTAPT

SEQ ID NO: 474 - protein, 114 aa, synthetic construct
RGEAETRECIYYNANWEKDRTNQTGVEPCEGDQDKRLHCYASWRNSSGTIELVKKGCWLDDFNCYDRQECVATEENPQVYFCCCEGNFCNERFTHLPEAGGPEVTYEPPPTAPT

SEQ ID NO: 475 - protein, 115 aa, synthetic construct
GRGEAETRECIYYNANWEKDRTNQTGVEPCEGDQDKRLHCYASWRNSSGTIELVKKGCWLDDFNCYDRQECVATEENPQVYFCCCEGNFCNERFTHLPEAGGPEVTYEPPPTAPT

SEQ ID NO: 476 - protein, 116 aa, synthetic construct
SGRGEAETRECIYYNANWEKDRTNQTGVEPCEGDQDKRLHCYASWRNSSGTIELVKKGCWLDDFNCYDRQECVATEENPQVYFCCCEGNFCNERFTHLPEAGGPEVTYEPPPTAPT

SEQ ID NO: 477 - protein, 111 aa, synthetic construct; identical to SEQ ID NO: 459

SEQ ID NO: 478 - protein, 112 aa, synthetic construct; identical to SEQ ID NO: 460

SEQ ID NO: 479 - protein, 113 aa, synthetic construct; identical to SEQ ID NO: 461

SEQ ID NO: 480 - protein, 114 aa, synthetic construct; identical to SEQ ID NO: 462

SEQ ID NO: 481 - protein, 115 aa, synthetic construct; identical to SEQ ID NO: 463

SEQ ID NO: 482 - protein, 116 aa, synthetic construct; identical to SEQ ID NO: 464

SEQ ID NO: 483 - protein, 111 aa, synthetic construct
AETQECIYYNANWEKDRTNQTGLERCEGEQDKRLHCYASWRNSSGTIELVKKGCWLDDFNCYDRQECVATEENPQVYFCCCEGNFCNERFTHLPEAGGPEVTYEPPPTAPT

SEQ ID NO: 484 - protein, 112 aa, synthetic construct
EAETQECIYYNANWEKDRTNQTGLERCEGEQDKRLHCYASWRNSSGTIELVKKGCWLDDFNCYDRQECVATEENPQVYFCCCEGNFCNERFTHLPEAGGPEVTYEPPPTAPT

SEQ ID NO: 485 - protein, 113 aa, synthetic construct
GEAETQECIYYNANWEKDRTNQTGLERCEGEQDKRLHCYASWRNSSGTIELVKKGCWLDDFNCYDRQECVATEENPQVYFCCCEGNFCNERFTHLPEAGGPEVTYEPPPTAPT

SEQ ID NO: 486 - protein, 114 aa, synthetic construct
RGEAETQECIYYNANWEKDRTNQTGLERCEGEQDKRLHCYASWRNSSGTIELVKKGCWLDDFNCYDRQECVATEENPQVYFCCCEGNFCNERFTHLPEAGGPEVTYEPPPTAPT

SEQ ID NO: 487 - protein, 115 aa, synthetic construct
GRGEAETQECIYYNANWEKDRTNQTGLERCEGEQDKRLHCYASWRNSSGTIELVKKGCWLDDFNCYDRQECVATEENPQVYFCCCEGNFCNERFTHLPEAGGPEVTYEPPPTAPT

SEQ ID NO: 488 - protein, 116 aa, synthetic construct
SGRGEAETQECIYYNANWEKDRTNQTGLERCEGEQDKRLHCYASWRNSSGTIELVKKGCWLDDFNCYDRQECVATEENPQVYFCCCEGNFCNERFTHLPEAGGPEVTYEPPPTAPT

SEQ ID NO: 489 - protein, 111 aa, synthetic construct
AETQECIYYNANWEKDRTNQSGLERCEGEQDKRLHCYASWRNSSGTIELVKKGCWLDDFNCYDRQECVATEENPQVYFCCCEGNFCNERFTHLPEAGGPEVTYEPPPTAPT

SEQ ID NO: 490 - protein, 112 aa, synthetic construct
EAETQECIYYNANWEKDRTNQSGLERCEGEQDKRLHCYASWRNSSGTIELVKKGCWLDDFNCYDRQECVATEENPQVYFCCCEGNFCNERFTHLPEAGGPEVTYEPPPTAPT

SEQ ID NO: 491 - protein, 113 aa, synthetic construct
GEAETQECIYYNANWEKDRTNQSGLERCEGEQDKRLHCYASWRNSSGTIELVKKGCWLDDFNCYDRQECVATEENPQVYFCCCEGNFCNERFTHLPEAGGPEVTYEPPPTAPT

SEQ ID NO: 492 - protein, 114 aa, synthetic construct
RGEAETQECIYYNANWEKDRTNQSGLERCEGEQDKRLHCYASWRNSSGTIELVKKGCWLDDFNCYDRQECVATEENPQVYFCCCEGNFCNERFTHLPEAGGPEVTYEPPPTAPT

SEQ ID NO: 493 - protein, 115 aa, synthetic construct
GRGEAETQECIYYNANWEKDRTNQSGLERCEGEQDKRLHCYASWRNSSGTIELVKKGCWLDDFNCYDRQECVATEENPQVYFCCCEGNFCNERFTHLPEAGGPEVTYEPPPTAPT

SEQ ID NO: 494 - protein, 116 aa, synthetic construct
SGRGEAETQECIYYNANWEKDRTNQSGLERCEGEQDKRLHCYASWRNSSGTIELVKKGCWLDDFNCYDRQECVATEENPQVYFCCCEGNFCNERFTHLPEAGGPEVTYEPPPTAPT

SEQ ID NO: 495 - protein, 111 aa, synthetic construct
AETRECIYYNANWEKDRTNQSGLERCEGEQDKRLHCYASWRNSSGTIELVKKGCWLDDFNCYDRQECVATEENPQVYFCCCEGNFCNERFTHLPEAGGPEVTYEPPPTAPT

SEQ ID NO: 496 - protein, 112 aa, synthetic construct
EAETRECIYYNANWEKDRTNQSGLERCEGEQDKRLHCYASWRNSSGTIELVKKGCWLDDFNCYDRQECVATEENPQVYFCCCEGNFCNERFTHLPEAGGPEVTYEPPPTAPT

SEQ ID NO: 497 - protein, 113 aa, synthetic construct
GEAETRECIYYNANWEKDRTNQSGLERCEGEQDKRLHCYASWRNSSGTIELVKKGCWLDDFNCYDRQECVATEENPQVYFCCCEGNFCNERFTHLPEAGGPEVTYEPPPTAPT

SEQ ID NO: 498 - protein, 114 aa, synthetic construct
RGEAETRECIYYNANWEKDRTNQSGLERCEGEQDKRLHCYASWRNSSGTIELVKKGCWLDDFNCYDRQECVATEENPQVYFCCCEGNFCNERFTHLPEAGGPEVTYEPPPTAPT

SEQ ID NO: 499 - protein, 115 aa, synthetic construct
GRGEAETRECIYYNANWEKDRTNQSGLERCEGEQDKRLHCYASWRNSSGTIELVKKGCWLDDFNCYDRQECVATEENPQVYFCCCEGNFCNERFTHLPEAGGPEVTYEPPPTAPT

SEQ ID NO: 500 - protein, 116 aa, synthetic construct
SGRGEAETRECIYYNANWEKDRTNQSGLERCEGEQDKRLHCYASWRNSSGTIELVKKGCWLDDFNCYDRQECVATEENPQVYFCCCEGNFCNERFTHLPEAGGPEVTYEPPPTAPT

SEQ ID NO: 501 - protein, 111 aa, synthetic construct
AETQECIYYNANWELERTNQSGLERCEGEQDKRLHCYASWRNSSGTIELVKKGCWLDDFNCYDRQECVATEENPQVYFCCCEGNFCNERFTHLPEAGGPEVTYEPPPTAPT

SEQ ID NO: 502 - protein, 112 aa, synthetic construct
EAETQECIYYNANWELERTNQSGLERCEGEQDKRLHCYASWRNSSGTIELVKKGCWLDDFNCYDRQECVATEENPQVYFCCCEGNFCNERFTHLPEAGGPEVTYEPPPTAPT

SEQ ID NO: 503 - protein, 113 aa, synthetic construct
GEAETQECIYYNANWELERTNQSGLERCEGEQDKRLHCYASWRNSSGTIELVKKGCWLDDFNCYDRQECVATEENPQVYFCCCEGNFCNERFTHLPEAGGPEVTYEPPPTAPT

SEQ ID NO: 504 - protein, 114 aa, synthetic construct
RGEAETQECIYYNANWELERTNQSGLERCEGEQDKRLHCYASWRNSSGTIELVKKGCWLDDFNCYDRQECVATEENPQVYFCCCEGNFCNERFTHLPEAGGPEVTYEPPPTAPT

SEQ ID NO: 505 - protein, 115 aa, synthetic construct
GRGEAETQECIYYNANWELERTNQSGLERCEGEQDKRLHCYASWRNSSGTIELVKKGCWLDDFNCYDRQECVATEENPQVYFCCCEGNFCNERFTHLPEAGGPEVTYEPPPTAPT

SEQ ID NO: 506 - protein, 116 aa, synthetic construct
SGRGEAETQECIYYNANWELERTNQSGLERCEGEQDKRLHCYASWRNSSGTIELVKKGCWLDDFNCYDRQECVATEENPQVYFCCCEGNFCNERFTHLPEAGGPEVTYEPPPTAPT

SEQ ID NO: 507 - protein, 111 aa, synthetic construct
AETRECIYYNANWELERTNQSGLERCEGEQDKRLHCFATWRNSSGTIELVKQGCWLDDFNCYDRQECVATEENPQVYFCCCEGNFCNERFTHLPEAGGPEVTYEPPPTAPT

SEQ ID NO: 508 - protein, 112 aa, synthetic construct
EAETRECIYYNANWELERTNQSGLERCEGEQDKRLHCFATWRNSSGTIELVKQGCWLDDFNCYDRQECVATEENPQVYFCCCEGNFCNERFTHLPEAGGPEVTYEPPPTAPT

SEQ ID NO: 509 - protein, 113 aa, synthetic construct
GEAETRECIYYNANWELERTNQSGLERCEGEQDKRLHCFATWRNSSGTIELVKQGCWLDDFNCYDRQECVATEENPQVYFCCCEGNFCNERFTHLPEAGGPEVTYEPPPTAPT

SEQ ID NO: 510 - protein, 114 aa, synthetic construct
RGEAETRECIYYNANWELERTNQSGLERCEGEQDKRLHCFATWRNSSGTIELVKQGCWLDDFNCYDRQECVATEENPQVYFCCCEGNFCNERFTHLPEAGGPEVTYEPPPTAPT

SEQ ID NO: 511 - protein, 115 aa, synthetic construct
GRGEAETRECIYYNANWELERTNQSGLERCEGEQDKRLHCFATWRNSSGTIELVKQGCWLDDFNCYDRQECVATEENPQVYFCCCEGNFCNERFTHLPEAGGPEVTYEPPPTAPT

SEQ ID NO: 512 - protein, 116 aa, synthetic construct
SGRGEAETRECIYYNANWELERTNQSGLERCEGEQDKRLHCFATWRNSSGTIELVKQGCWLDDFNCYDRQECVATEENPQVYFCCCEGNFCNERFTHLPEAGGPEVTYEPPPTAPT

SEQ ID NO: 513 - protein, 111 aa, synthetic construct
AETRECIYYNANWELERTNQSGLERCYGDKDKRRHCYASWRNSSGTIELVKKGCWLDDINCYDRQECVATEENPQVYFCCCEGNFCNERFTHLPEAGGPEVTYEPPPTAPT

SEQ ID NO: 514 - protein, 112 aa, synthetic construct
EAETRECIYYNANWELERTNQSGLERCYGDKDKRRHCYASWRNSSGTIELVKKGCWLDDINCYDRQECVATEENPQVYFCCCEGNFCNERFTHLPEAGGPEVTYEPPPTAPT

SEQ ID NO: 515 - protein, 113 aa, synthetic construct
GEAETRECIYYNANWELERTNQSGLERCYGDKDKRRHCYASWRNSSGTIELVKKGCWLDDINCYDRQECVATEENPQVYFCCCEGNFCNERFTHLPEAGGPEVTYEPPPTAPT

SEQ ID NO: 516 - protein, 114 aa, synthetic construct
RGEAETRECIYYNANWELERTNQSGLERCYGDKDKRRHCYASWRNSSGTIELVKKGCWLDDINCYDRQECVATEENPQVYFCCCEGNFCNERFTHLPEAGGPEVTYEPPPTAPT

SEQ ID NO: 517 - protein, 115 aa, synthetic construct
GRGEAETRECIYYNANWELERTNQSGLERCYGDKDKRRHCYASWRNSSGTIELVKKGCWLDDINCYDRQECVATEENPQVYFCCCEGNFCNERFTHLPEAGGPEVTYEPPPTAPT

SEQ ID NO: 518 - protein, 116 aa, synthetic construct
SGRGEAETRECIYYNANWELERTNQSGLERCYGDKDKRRHCYASWRNSSGTIELVKKGCWLDDINCYDRQECVATEENPQVYFCCCEGNFCNERFTHLPEAGGPEVTYEPPPTAPT

SEQ ID NO: 519 - protein, 111 aa, synthetic construct
AETRECIYYNANWELERTNQSGLERCEGEQDKRLHCYASWRNSSGTIELVKKGCWLDDFNCYDRQECVATKENPQVYFCCCEGNFCNERFTHLPEAGGPEVTYEPPPTAPT

SEQ ID NO: 520 - protein, 112 aa, synthetic construct
EAETRECIYYNANWELERTNQSGLERCEGEQDKRLHCYASWRNSSGTIELVKKGCWLDDFNCYDRQECVATKENPQVYFCCCEGNFCNERFTHLPEAGGPEVTYEPPPTAPT

SEQ ID NO: 521 - protein, 113 aa, synthetic construct
GEAETRECIYYNANWELERTNQSGLERCEGEQDKRLHCYASWRNSSGTIELVKKGCWLDDFNCYDRQECVATKENPQVYFCCCEGNFCNERFTHLPEAGGPEVTYEPPPTAPT

SEQ ID NO: 522 - protein, 114 aa, synthetic construct
RGEAETRECIYYNANWELERTNQSGLERCEGEQDKRLHCYASWRNSSGTIELVKKGCWLDDFNCYDRQECVATKENPQVYFCCCEGNFCNERFTHLPEAGGPEVTYEPPPTAPT

SEQ ID NO: 523 - protein, 115 aa, synthetic construct
GRGEAETRECIYYNANWELERTNQSGLERCEGEQDKRLHCYASWRNSSGTIELVKKGCWLDDFNCYDRQECVATKENPQVYFCCCEGNFCNERFTHLPEAGGPEVTYEPPPTAPT

SEQ ID NO: 524 - protein, 116 aa, synthetic construct
SGRGEAETRECIYYNANWELERTNQSGLERCEGEQDKRLHCYASWRNSSGTIELVKKGCWLDDFNCYDRQECVATKENPQVYFCCCEGNFCNERFTHLPEAGGPEVTYEPPPTAPT

SEQ ID NO: 525 - protein, 111 aa, synthetic construct
AETRECIYYNANWELERTNQSGLERCEGEQDKRLHCYASWRNSSGTIELVKKGCWLDDINCYDRQECVATEENPQVYFCCCEGNFCNERFTHLPEAGGPEVTYEPPPTAPT

SEQ ID NO: 526 - protein, 112 aa, synthetic construct
EAETRECIYYNANWELERTNQSGLERCEGEQDKRLHCYASWRNSSGTIELVKKGCWLDDINCYDRQECVATEENPQVYFCCCEGNFCNERFTHLPEAGGPEVTYEPPPTAPT

SEQ ID NO: 527 - protein, 113 aa, synthetic construct
GEAETRECIYYNANWELERTNQSGLERCEGEQDKRLHCYASWRNSSGTIELVKKGCWLDDINCYDRQECVATEENPQVYFCCCEGNFCNERFTHLPEAGGPEVTYEPPPTAPT

SEQ ID NO: 528 - protein, 114 aa, synthetic construct
RGEAETRECIYYNANWELERTNQSGLERCEGEQDKRLHCYASWRNSSGTIELVKKGCWLDDINCYDRQECVATEENPQVYFCCCEGNFCNERFTHLPEAGGPEVTYEPPPTAPT

SEQ ID NO: 529 - protein, 115 aa, synthetic construct
GRGEAETRECIYYNANWELERTNQSGLERCEGEQDKRLHCYASWRNSSGTIELVKKGCWLDDINCYDRQECVATEENPQVYFCCCEGNFCNERFTHLPEAGGPEVTYEPPPTAPT

SEQ ID NO: 530 - protein, 116 aa, synthetic construct
SGRGEAETRECIYYNANWELERTNQSGLERCEGEQDKRLHCYASWRNSSGTIELVKKGCWLDDINCYDRQECVATEENPQVYFCCCEGNFCNERFTHLPEAGGPEVTYEPPPTAPT

SEQ ID NO: 531 - protein, 111 aa, synthetic construct
AETRECIYYNANWELERTNQSGLERCEGEQDKRLHCYASWRNSSGTIELVKKGCWLDDINCYDRQECVATKENPQVYFCCCEGNFCNERFTHLPEAGGPEVTYEPPPTAPT

SEQ ID NO: 532 - protein, 112 aa, synthetic construct
EAETRECIYYNANWELERTNQSGLERCEGEQDKRLHCYASWRNSSGTIELVKKGCWLDDINCYDRQECVATKENPQVYFCCCEGNFCNERFTHLPEAGGPEVTYEPPPTAPT

SEQ ID NO: 533 - protein, 113 aa, synthetic construct
GEAETRECIYYNANWELERTNQSGLERCEGEQDKRLHCYASWRNSSGTIELVKKGCWLDDINCYDRQECVATKENPQVYFCCCEGNFCNERFTHLPEAGGPEVTYEPPPTAPT

SEQ ID NO: 534 - protein, 114 aa, synthetic construct
RGEAETRECIYYNANWELERTNQSGLERCEGEQDKRLHCYASWRNSSGTIELVKKGCWLDDINCYDRQECVATKENPQVYFCCCEGNFCNERFTHLPEAGGPEVTYEPPPTAPT

SEQ ID NO: 535 - protein, 115 aa, synthetic construct
GRGEAETRECIYYNANWELERTNQSGLERCEGEQDKRLHCYASWRNSSGTIELVKKGCWLDDINCYDRQECVATKENPQVYFCCCEGNFCNERFTHLPEAGGPEVTYEPPPTAPT

SEQ ID NO: 536 - protein, 116 aa, synthetic construct
SGRGEAETRECIYYNANWELERTNQSGLERCEGEQDKRLHCYASWRNSSGTIELVKKGCWLDDINCYDRQECVATKENPQVYFCCCEGNFCNERFTHLPEAGGPEVTYEPPPTAPT

SEQ ID NO: 537 - protein, 111 aa, synthetic construct
AETRECIYYNANWELERTNQSGLERCEGDKDKRLHCYASWRNSSGTIELVKKGCWLDDINCYDRQECVATKENPQVYFCCCEGNFCNERFTHLPEAGGPEVTYEPPPTAPT

SEQ ID NO: 538 - protein, 112 aa, synthetic construct
EAETRECIYYNANWELERTNQSGLERCEGDKDKRLHCYASWRNSSGTIELVKKGCWLDDINCYDRQECVATKENPQVYFCCCEGNFCNERFTHLPEAGGPEVTYEPPPTAPT

SEQ ID NO: 539 - protein, 113 aa, synthetic construct
GEAETRECIYYNANWELERTNQSGLERCEGDKDKRLHCYASWRNSSGTIELVKKGCWLDDINCYDRQECVATKENPQVYFCCCEGNFCNERFTHLPEAGGPEVTYEPPPTAPT

SEQ ID NO: 540 - protein, 114 aa, synthetic construct
RGEAETRECIYYNANWELERTNQSGLERCEGDKDKRLHCYASWRNSSGTIELVKKGCWLDDINCYDRQECVATKENPQVYFCCCEGNFCNERFTHLPEAGGPEVTYEPPPTAPT

SEQ ID NO: 541 - protein, 115 aa, synthetic construct
GRGEAETRECIYYNANWELERTNQSGLERCEGDKDKRLHCYASWRNSSGTIELVKKGCWLDDINCYDRQECVATKENPQVYFCCCEGNFCNERFTHLPEAGGPEVTYEPPPTAPT

SEQ ID NO: 542 - protein, 116 aa, synthetic construct
SGRGEAETRECIYYNANWELERTNQSGLERCEGDKDKRLHCYASWRNSSGTIELVKKGCWLDDINCYDRQECVATKENPQVYFCCCEGNFCNERFTHLPEAGGPEVTYEPPPTAPT

SEQ ID NO: 543 - protein, 111 aa, synthetic construct
AETRECIYYNANWELERTNQSGLERCEGDQDKRLHCYASWRNSSGTIELVKKGCWLDDINCYDRQECVATKENPQVYFCCCEGNFCNERFTHLPEAGGPEVTYEPPPTAPT

SEQ ID NO: 544 - protein, 112 aa, synthetic construct
EAETRECIYYNANWELERTNQSGLERCEGDQDKRLHCYASWRNSSGTIELVKKGCWLDDINCYDRQECVATKENPQVYFCCCEGNFCNERFTHLPEAGGPEVTYEPPPTAPT

SEQ ID NO: 545 - protein, 113 aa, synthetic construct
GEAETRECIYYNANWELERTNQSGLERCEGDQDKRLHCYASWRNSSGTIELVKKGCWLDDINCYDRQECVATKENPQVYFCCCEGNFCNERFTHLPEAGGPEVTYEPPPTAPT

SEQ ID NO: 546 - protein, 114 aa, synthetic construct
RGEAETRECIYYNANWELERTNQSGLERCEGDQDKRLHCYASWRNSSGTIELVKKGCWLDDINCYDRQECVATKENPQVYFCCCEGNFCNERFTHLPEAGGPEVTYEPPPTAPT

SEQ ID NO: 547 - protein, 115 aa, synthetic construct
GRGEAETRECIYYNANWELERTNQSGLERCEGDQDKRLHCYASWRNSSGTIELVKKGCWLDDINCYDRQECVATKENPQVYFCCCEGNFCNERFTHLPEAGGPEVTYEPPPTAPT

SEQ ID NO: 548 - protein, 116 aa, synthetic construct
SGRGEAETRECIYYNANWELERTNQSGLERCEGDQDKRLHCYASWRNSSGTIELVKKGCWLDDINCYDRQECVATKENPQVYFCCCEGNFCNERFTHLPEAGGPEVTYEPPPTAPT

SEQ ID NO: 549 - protein, 111 aa, synthetic construct
AETRECIYYNANWELERTNQSGLERCEGDQDKRLHCYASWRNSSGTIELVKKGCWLDDFNCYDRQECVATKENPQVYFCCCEGNFCNERFTHLPEAGGPEVTYEPPPTAPT

SEQ ID NO: 550 - protein, 112 aa, synthetic construct
EAETRECIYYNANWELERTNQSGLERCEGDQDKRLHCYASWRNSSGTIELVKKGCWLDDFNCYDRQECVATKENPQVYFCCCEGNFCNERFTHLPEAGGPEVTYEPPPTAPT

SEQ ID NO: 551 - protein, 113 aa, synthetic construct
GEAETRECIYYNANWELERTNQSGLERCEGDQDKRLHCYASWRNSSGTIELVKKGCWLDDFNCYDRQECVATKENPQVYFCCCEGNFCNERFTHLPEAGGPEVTYEPPPTAPT

SEQ ID NO: 552 - protein, 114 aa, synthetic construct
RGEAETRECIYYNANWELERTNQSGLERCEGDQDKRLHCYASWRNSSGTIELVKKGCWLDDFNCYDRQECVATKENPQVYFCCCEGNFCNERFTHLPEAGGPEVTYEPPPTAPT

SEQ ID NO: 553 - protein, 115 aa, synthetic construct
GRGEAETRECIYYNANWELERTNQSGLERCEGDQDKRLHCYASWRNSSGTIELVKKGCWLDDFNCYDRQECVATKENPQVYFCCCEGNFCNERFTHLPEAGGPEVTYEPPPTAPT

SEQ ID NO: 554 - protein, 116 aa, synthetic construct
SGRGEAETRECIYYNANWELERTNQSGLERCEGDQDKRLHCYASWRNSSGTIELVKKGCWLDDFNCYDRQECVATKENPQVYFCCCEGNFCNERFTHLPEAGGPEVTYEPPPTAPT

SEQ ID NO: 555 - protein, 111 aa, synthetic construct
AETRECIYYNANWELERTNQSGLERCEGDQDKRLHCYASWRNSSGTIELVKKGCWLDDFNCYDRQECVATEENPQVYFCCCEGNFCNERFTHLPEAGGPEVTYEPPPTAPT

SEQ ID NO: 556 - protein, 112 aa, synthetic construct
EAETRECIYYNANWELERTNQSGLERCEGDQDKRLHCYASWRNSSGTIELVKKGCWLDDFNCYDRQECVATEENPQVYFCCCEGNFCNERFTHLPEAGGPEVTYEPPPTAPT

SEQ ID NO: 557 - protein, 113 aa, synthetic construct
GEAETRECIYYNANWELERTNQSGLERCEGDQDKRLHCYASWRNSSGTIELVKKGCWLDDFNCYDRQECVATEENPQVYFCCCEGNFCNERFTHLPEAGGPEVTYEPPPTAPT

SEQ ID NO: 558 - protein, 114 aa, synthetic construct
RGEAETRECIYYNANWELERTNQSGLERCEGDQDKRLHCYASWRNSSGTIELVKKGCWLDDFNCYDRQECVATEENPQVYFCCCEGNFCNERFTHLPEAGGPEVTYEPPPTAPT

SEQ ID NO: 559 - protein, 115 aa, synthetic construct
GRGEAETRECIYYNANWELERTNQSGLERCEGDQDKRLHCYASWRNSSGTIELVKKGCWLDDFNCYDRQECVATEENPQVYFCCCEGNFCNERFTHLPEAGGPEVTYEPPPTAPT

SEQ ID NO: 560 - protein, 116 aa, synthetic construct
SGRGEAETRECIYYNANWELERTNQSGLERCEGDQDKRLHCYASWRNSSGTIELVKKGCWLDDFNCYDRQECVATEENPQVYFCCCEGNFCNERFTHLPEAGGPEVTYEPPPTAPT

SEQ ID NO: 561 - protein, 111 aa, synthetic construct
AETRECIYYNANWELERTNQSGLERCYGDKDKRRHCYASWRNSSGTIELVKKGCWLDDINCYDRQECVEKKDSPEVYFCCCEGNFCNERFTHLPEAGGPEVTYEPPPTAPT

SEQ ID NO: 562 - protein, 112 aa, synthetic construct
EAETRECIYYNANWELERTNQSGLERCYGDKDKRRHCYASWRNSSGTIELVKKGCWLDDINCYDRQECVEKKDSPEVYFCCCEGNFCNERFTHLPEAGGPEVTYEPPPTAPT

SEQ ID NO: 563 - protein, 113 aa, synthetic construct
GEAETRECIYYNANWELERTNQSGLERCYGDKDKRRHCYASWRNSSGTIELVKKGCWLDDINCYDRQECVEKKDSPEVYFCCCEGNFCNERFTHLPEAGGPEVTYEPPPTAPT

SEQ ID NO: 564 - protein, 114 aa, synthetic construct
RGEAETRECIYYNANWELERTNQSGLERCYGDKDKRRHCYASWRNSSGTIELVKKGCWLDDINCYDRQECVEKKDSPEVYFCCCEGNFCNERFTHLPEAGGPEVTYEPPPTAPT

SEQ ID NO: 565 - protein, 115 aa, synthetic construct
GRGEAETRECIYYNANWELERTNQSGLERCYGDKDKRRHCYASWRNSSGTIELVKKGCWLDDINCYDRQECVEKKDSPEVYFCCCEGNFCNERFTHLPEAGGPEVTYEPPPTAPT

SEQ ID NO: 566 - protein, 116 aa, synthetic construct
SGRGEAETRECIYYNANWELERTNQSGLERCYGDKDKRRHCYASWRNSSGTIELVKKGCWLDDINCYDRQECVEKKDSPEVYFCCCEGNFCNERFTHLPEAGGPEVTYEPPPTAPT

SEQ ID NO: 567 - protein, 111 aa, synthetic construct
AETRECIFFNANWEKDRTNQTGVEPCEGEQDKRLHCYASWRNSSGTIELVKKGCWLDDFNCYDRQECVATEENPQVYFCCCEGNFCNERFTHLPEAGGPEVTYEPPPTAPT

SEQ ID NO: 568 - protein, 112 aa, synthetic construct
EAETRECIFFNANWEKDRTNQTGVEPCEGEQDKRLHCYASWRNSSGTIELVKKGCWLDDFNCYDRQECVATEENPQVYFCCCEGNFCNERFTHLPEAGGPEVTYEPPPTAPT

SEQ ID NO: 569 - protein, 113 aa, synthetic construct
GEAETRECIFFNANWEKDRTNQTGVEPCEGEQDKRLHCYASWRNSSGTIELVKKGCWLDDFNCYDRQECVATEENPQVYFCCCEGNFCNERFTHLPEAGGPEVTYEPPPTAPT

SEQ ID NO: 570 - protein, 114 aa, synthetic construct
RGEAETRECIFFNANWEKDRTNQTGVEPCEGEQDKRLHCYASWRNSSGTIELVKKGCWLDDFNCYDRQECVATEENPQVYFCCCEGNFCNERFTHLPEAGGPEVTYEPPPTAPT

SEQ ID NO: 571 - protein, 115 aa, synthetic construct
GRGEAETRECIFFNANWEKDRTNQTGVEPCEGEQDKRLHCYASWRNSSGTIELVKKGCWLDDFNCYDRQECVATEENPQVYFCCCEGNFCNERFTHLPEAGGPEVTYEPPPTAPT

SEQ ID NO: 572 - protein, 116 aa, synthetic construct
SGRGEAETRECIFFNANWEKDRTNQTGVEPCEGEQDKRLHCYASWRNSSGTIELVKKGCWLDDFNCYDRQECVATEENPQVYFCCCEGNFCNERFTHLPEAGGPEVTYEPPPTAPT

SEQ ID NO: 573 - protein, 111 aa, synthetic construct
AETRECIYYNANWELERTNQSGLERCEGEQDKRLHCFATWKNISGSIELVKQGCWLDDFNCYDRQECVATEENPQVYFCCCEGNFCNERFTHLPEAGGPEVTYEPPPTAPT

SEQ ID NO: 574 - protein, 112 aa, synthetic construct
EAETRECIYYNANWELERTNQSGLERCEGEQDKRLHCFATWKNISGSIELVKQGCWLDDFNCYDRQECVATEENPQVYFCCCEGNFCNERFTHLPEAGGPEVTYEPPPTAPT

SEQ ID NO: 575 - protein, 113 aa, synthetic construct
GEAETRECIYYNANWELERTNQSGLERCEGEQDKRLHCFATWKNISGSIELVKQGCWLDDFNCYDRQECVATEENPQVYFCCCEGNFCNERFTHLPEAGGPEVTYEPPPTAPT

SEQ ID NO: 576 - protein, 114 aa, synthetic construct
RGEAETRECIYYNANWELERTNQSGLERCEGEQDKRLHCFATWKNISGSIELVKQGCWLDDFNCYDRQECVATEENPQVYFCCCEGNFCNERFTHLPEAGGPEVTYEPPPTAPT

SEQ ID NO: 577 - protein, 115 aa, synthetic construct
GRGEAETRECIYYNANWELERTNQSGLERCEGEQDKRLHCFATWKNISGSIELVKQGCWLDDFNCYDRQECVATEENPQVYFCCCEGNFCNERFTHLPEAGGPEVTYEPPPTAPT

SEQ ID NO: 578 - protein, 116 aa, synthetic construct
SGRGEAETRECIYYNANWELERTNQSGLERCEGEQDKRLHCFATWKNISGSIELVKQGCWLDDFNCYDRQECVATEENPQVYFCCCEGNFCNERFTHLPEAGGPEVTYEPPPTAPT

SEQ ID NO: 579 - protein, 111 aa, synthetic construct
AETRECIYYNANWELERTNQSGLERCEGEQDKRLHCYASWRNSSGTIELVKKGCWLDDFNCYDRTDCVATEENPQVYFCCCEGNFCNERFTHLPEAGGPEVTYEPPPTAPT

SEQ ID NO: 580 - protein, 112 aa, synthetic construct
EAETRECIYYNANWELERTNQSGLERCEGEQDKRLHCYASWRNSSGTIELVKKGCWLDDFNCYDRTDCVATEENPQVYFCCCEGNFCNERFTHLPEAGGPEVTYEPPPTAPT

SEQ ID NO: 581 - protein, 113 aa, synthetic construct
GEAETRECIYYNANWELERTNQSGLERCEGEQDKRLHCYASWRNSSGTIELVKKGCWLDDFNCYDRTDCVATEENPQVYFCCCEGNFCNERFTHLPEAGGPEVTYEPPPTAPT

SEQ ID NO: 582 - protein, 114 aa, synthetic construct
RGEAETRECIYYNANWELERTNQSGLERCEGEQDKRLHCYASWRNSSGTIELVKKGCWLDDFNCYDRTDCVATEENPQVYFCCCEGNFCNERFTHLPEAGGPEVTYEPPPTAPT

SEQ ID NO: 583 - protein, 115 aa, synthetic construct
GRGEAETRECIYYNANWELERTNQSGLERCEGEQDKRLHCYASWRNSSGTIELVKKGCWLDDFNCYDRTDCVATEENPQVYFCCCEGNFCNERFTHLPEAGGPEVTYEPPPTAPT

SEQ ID NO: 584 - protein, 116 aa, synthetic construct
SGRGEAETRECIYYNANWELERTNQSGLERCEGEQDKRLHCYASWRNSSGTIELVKKGCWLDDFNCYDRTDCVATEENPQVYFCCCEGNFCNERFTHLPEAGGPEVTYEPPPTAPT

SEQ ID NO: 585 - protein, 111 aa, synthetic construct
AETRECIYYNANWELERTNQSGLERCEGEQDKRLHCYASWRNSSGTIELVKKGCWLDDFNCYDRQECVATEENPQVYFCCCEGNMCNERFTHLPEAGGPEVTYEPPPTAPT

SEQ ID NO: 586 - protein, 112 aa, synthetic construct
EAETRECIYYNANWELERTNQSGLERCEGEQDKRLHCYASWRNSSGTIELVKKGCWLDDFNCYDRQECVATEENPQVYFCCCEGNMCNERFTHLPEAGGPEVTYEPPPTAPT

SEQ ID NO: 587 - protein, 113 aa, synthetic construct
GEAETRECIYYNANWELERTNQSGLERCEGEQDKRLHCYASWRNSSGTIELVKKGCWLDDFNCYDRQECVATEENPQVYFCCCEGNMCNERFTHLPEAGGPEVTYEPPPTAPT

SEQ ID NO: 588 - protein, 114 aa, synthetic construct
RGEAETRECIYYNANWELERTNQSGLERCEGEQDKRLHCYASWRNSSGTIELVKKGCWLDDFNCYDRQECVATEENPQVYFCCCEGNMCNERFTHLPEAGGPEVTYEPPPTAPT

SEQ ID NO: 589 - protein, 115 aa, synthetic construct
GRGEAETRECIYYNANWELERTNQSGLERCEGEQDKRLHCYASWRNSSGTIELVKKGCWLDDFNCYDRQECVATEENPQVYFCCCEGNMCNERFTHLPEAGGPEVTYEPPPTAPT

SEQ ID NO: 590 - protein, 116 aa, synthetic construct
SGRGEAETRECIYYNANWELERTNQSGLERCEGEQDKRLHCYASWRNSSGTIELVKKGCWLDDFNCYDRQECVATEENPQVYFCCCEGNMCNERFTHLPEAGGPEVTYEPPPTAPT

SEQ ID NO: 591 - protein, 111 aa, synthetic construct
AETRECIYYNANWELERTNQSGLERCEGDQDKRLHCYASWRNSSGTIELVKKGCWLDDINCYDRQECVATEENPQVYFCCCEGNFCNERFTHLPEAGGPEVTYEPPPTAPT

SEQ ID NO: 592 - protein, 112 aa, synthetic construct
EAETRECIYYNANWELERTNQSGLERCEGDQDKRLHCYASWRNSSGTIELVKKGCWLDDINCYDRQECVATEENPQVYFCCCEGNFCNERFTHLPEAGGPEVTYEPPPTAPT

SEQ ID NO: 593 - protein, 113 aa, synthetic construct
GEAETRECIYYNANWELERTNQSGLERCEGDQDKRLHCYASWRNSSGTIELVKKGCWLDDINCYDRQECVATEENPQVYFCCCEGNFCNERFTHLPEAGGPEVTYEPPPTAPT

SEQ ID NO: 594 - protein, 114 aa, synthetic construct
RGEAETRECIYYNANWELERTNQSGLERCEGDQDKRLHCYASWRNSSGTIELVKKGCWLDDINCYDRQECVATEENPQVYFCCCEGNFCNERFTHLPEAGGPEVTYEPPPTAPT

SEQ ID NO: 595 - protein, 115 aa, synthetic construct
GRGEAETRECIYYNANWELERTNQSGLERCEGDQDKRLHCYASWRNSSGTIELVKKGCWLDDINCYDRQECVATEENPQVYFCCCEGNFCNERFTHLPEAGGPEVTYEPPPTAPT

SEQ ID NO: 596 - protein, 116 aa, synthetic construct
SGRGEAETRECIYYNANWELERTNQSGLERCEGDQDKRLHCYASWRNSSGTIELVKKGCWLDDINCYDRQECVATEENPQVYFCCCEGNFCNERFTHLPEAGGPEVTYEPPPTAPT

SEQ ID NO: 597 - protein, 111 aa, synthetic construct
AETQECLFFNANWEKDRTNQSGVEPCYGDKDKRRHCYASWRNSSGTIELVKKGCWLDDFNCYDRQECVATEENPQVYFCCCEGNFCNERFTHLPEAGGPEVTYEPPPTAPT

SEQ ID NO: 598 - protein, 112 aa, synthetic construct
EAETQECLFFNANWEKDRTNQSGVEPCYGDKDKRRHCYASWRNSSGTIELVKKGCWLDDFNCYDRQECVATEENPQVYFCCCEGNFCNERFTHLPEAGGPEVTYEPPPTAPT

SEQ ID NO: 599 - protein, 113 aa, synthetic construct
GEAETQECLFFNANWEKDRTNQSGVEPCYGDKDKRRHCYASWRNSSGTIELVKKGCWLDDFNCYDRQECVATEENPQVYFCCCEGNFCNERFTHLPEAGGPEVTYEPPPTAPT

SEQ ID NO: 600 - protein, 114 aa, synthetic construct
RGEAETQECLFFNANWEKDRTNQSGVEPCYGDKDKRRHCYASWRNSSGTIELVKKGCWLDDFNCYDRQECVATEENPQVYFCCCEGNFCNERFTHLPEAGGPEVTYEPPPTAPT

SEQ ID NO: 601 - protein, 115 aa, synthetic construct
GRGEAETQECLFFNANWEKDRTNQSGVEPCYGDKDKRRHCYASWRNSSGTIELVKKGCWLDDFNCYDRQECVATEENPQVYFCCCEGNFCNERFTHLPEAGGPEVTYEPPPTAPT

SEQ ID NO: 602 - protein, 116 aa, synthetic construct
SGRGEAETQECLFFNANWEKDRTNQSGVEPCYGDKDKRRHCYASWRNSSGTIELVKKGCWLDDFNCYDRQECVATEENPQVYFCCCEGNFCNERFTHLPEAGGPEVTYEPPPTAPT

SEQ ID NO: 603 - protein, 111 aa, synthetic construct
AETQECLFFNANWEKDRTNQSGVEPCEGEQDKRLHCYASWRNSSGTIELVKKGCWLDDFNCYDRQECVATEENPQVYFCCCEGNFCNERFTHLPEAGGPEVTYEPPPTAPT

SEQ ID NO: 604 - protein, 112 aa, synthetic construct
EAETQECLFFNANWEKDRTNQSGVEPCEGEQDKRLHCYASWRNSSGTIELVKKGCWLDDFNCYDRQECVATEENPQVYFCCCEGNFCNERFTHLPEAGGPEVTYEPPPTAPT

SEQ ID NO: 605 - protein, 113 aa, synthetic construct
GEAETQECLFFNANWEKDRTNQSGVEPCEGEQDKRLHCYASWRNSSGTIELVKKGCWLDDFNCYDRQECVATEENPQVYFCCCEGNFCNERFTHLPEAGGPEVTYEPPPTAPT

SEQ ID NO: 606 - protein, 114 aa, synthetic construct
RGEAETQECLFFNANWEKDRTNQSGVEPCEGEQDKRLHCYASWRNSSGTIELVKKGCWLDDFNCYDRQECVATEENPQVYFCCCEGNFCNERFTHLPEAGGPEVTYEPPPTAPT

SEQ ID NO: 607 - protein, 115 aa, synthetic construct
GRGEAETQECLFFNANWEKDRTNQSGVEPCEGEQDKRLHCYASWRNSSGTIELVKKGCWLDDFNCYDRQECVATEENPQVYFCCCEGNFCNERFTHLPEAGGPEVTYEPPPTAPT

SEQ ID NO: 608 - protein, 116 aa, synthetic construct
SGRGEAETQECLFFNANWEKDRTNQSGVEPCEGEQDKRLHCYASWRNSSGTIELVKKGCWLDDFNCYDRQECVATEENPQVYFCCCEGNFCNERFTHLPEAGGPEVTYEPPPTAPT

SEQ ID NO: 609 - protein, 111 aa, synthetic construct
AETRECLFFNANWEKDRTNQSGVEPCEGEQDKRLHCYASWRNSSGTIELVKKGCWLDDFNCYDRQECVATEENPQVYFCCCEGNFCNERFTHLPEAGGPEVTYEPPPTAPT

SEQ ID NO: 610 - protein, 112 aa, synthetic construct
EAETRECLFFNANWEKDRTNQSGVEPCEGEQDKRLHCYASWRNSSGTIELVKKGCWLDDFNCYDRQECVATEENPQVYFCCCEGNFCNERFTHLPEAGGPEVTYEPPPTAPT

SEQ ID NO: 611 - protein, 113 aa, synthetic construct
GEAETRECLFFNANWEKDRTNQSGVEPCEGEQDKRLHCYASWRNSSGTIELVKKGCWLDDFNCYDRQECVATEENPQVYFCCCEGNFCNERFTHLPEAGGPEVTYEPPPTAPT

SEQ ID NO: 612 - protein, 114 aa, synthetic construct
RGEAETRECLFFNANWEKDRTNQSGVEPCEGEQDKRLHCYASWRNSSGTIELVKKGCWLDDFNCYDRQECVATEENPQVYFCCCEGNFCNERFTHLPEAGGPEVTYEPPPTAPT

SEQ ID NO: 613 - protein, 115 aa, synthetic construct
GRGEAETRECLFFNANWEKDRTNQSGVEPCEGEQDKRLHCYASWRNSSGTIELVKKGCWLDDFNCYDRQECVATEENPQVYFCCCEGNFCNERFTHLPEAGGPEVTYEPPPTAPT

SEQ ID NO: 614 - protein, 116 aa, synthetic construct
SGRGEAETRECLFFNANWEKDRTNQSGVEPCEGEQDKRLHCYASWRNSSGTIELVKKGCWLDDFNCYDRQECVATEENPQVYFCCCEGNFCNERFTHLPEAGGPEVTYEPPPTAPT

SEQ ID NO: 615 - protein, 111 aa, synthetic construct
AETQECLFFNANWEKDRTNQSGVEPCYGEQDKRLHCYASWRNSSGTIELVKKGCWLDDFNCYDRQECVATEENPQVYFCCCEGNFCNERFTHLPEAGGPEVTYEPPPTAPT

SEQ ID NO: 616 - protein, 112 aa, synthetic construct
EAETQECLFFNANWEKDRTNQSGVEPCYGEQDKRLHCYASWRNSSGTIELVKKGCWLDDFNCYDRQECVATEENPQVYFCCCEGNFCNERFTHLPEAGGPEVTYEPPPTAPT

SEQ ID NO: 617 - protein, 113 aa, synthetic construct
GEAETQECLFFNANWEKDRTNQSGVEPCYGEQDKRLHCYASWRNSSGTIELVKKGCWLDDFNCYDRQECVATEENPQVYFCCCEGNFCNERFTHLPEAGGPEVTYEPPPTAPT

SEQ ID NO: 618 - protein, 114 aa, synthetic construct
RGEAETQECLFFNANWEKDRTNQSGVEPCYGEQDKRLHCYASWRNSSGTIELVKKGCWLDDFNCYDRQECVATEENPQVYFCCCEGNFCNERFTHLPEAGGPEVTYEPPPTAPT

SEQ ID NO: 619 - protein, 115 aa, synthetic construct
GRGEAETQECLFFNANWEKDRTNQSGVEPCYGEQDKRLHCYASWRNSSGTIELVKKGCWLDDFNCYDRQECVATEENPQVYFCCCEGNFCNERFTHLPEAGGPEVTYEPPPTAPT

SEQ ID NO: 620 - protein, 116 aa, synthetic construct
SGRGEAETQECLFFNANWEKDRTNQSGVEPCYGEQDKRLHCYASWRNSSGTIELVKKGCWLDDFNCYDRQECVATEENPQVYFCCCEGNFCNERFTHLPEAGGPEVTYEPPPTAPT

SEQ ID NO: 621 - protein, 111 aa, synthetic construct
AETRECLFFNANWEKDRTNQSGVEPCYGDKDKRRHCYASWRNSSGTIELVKKGCWLDDFNCYDRQECVATEENPQVYFCCCEGNFCNERFTHLPEAGGPEVTYEPPPTAPT

SEQ ID NO: 622 - protein, 112 aa, synthetic construct
EAETRECLFFNANWEKDRTNQSGVEPCYGDKDKRRHCYASWRNSSGTIELVKKGCWLDDFNCYDRQECVATEENPQVYFCCCEGNFCNERFTHLPEAGGPEVTYEPPPTAPT

SEQ ID NO: 623 - protein, 113 aa, synthetic construct
GEAETRECLFFNANWEKDRTNQSGVEPCYGDKDKRRHCYASWRNSSGTIELVKKGCWLDDFNCYDRQECVATEENPQVYFCCCEGNFCNERFTHLPEAGGPEVTYEPPPTAPT

SEQ ID NO: 624 - protein, 114 aa, synthetic construct
RGEAETRECLFFNANWEKDRTNQSGVEPCYGDKDKRRHCYASWRNSSGTIELVKKGCWLDDFNCYDRQECVATEENPQVYFCCCEGNFCNERFTHLPEAGGPEVTYEPPPTAPT

SEQ ID NO: 625 - protein, 115 aa, synthetic construct
GRGEAETRECLFFNANWEKDRTNQSGVEPCYGDKDKRRHCYASWRNSSGTIELVKKGCWLDDFNCYDRQECVATEENPQVYFCCCEGNFCNERFTHLPEAGGPEVTYEPPPTAPT

SEQ ID NO: 626 - protein, 116 aa, synthetic construct
SGRGEAETRECLFFNANWEKDRTNQSGVEPCYGDKDKRRHCYASWRNSSGTIELVKKGCWLDDFNCYDRQECVATEENPQVYFCCCEGNFCNERFTHLPEAGGPEVTYEPPPTAPT

SEQ ID NO: 627 - protein, 111 aa, synthetic construct
AETRECLFFNANWEKDRTNQTGVEPCYGDKDKRRHCFATWKNISGSIEIVKQGCWLDDFNCYDRQECVATEENPQVYFCCCEGNFCNERFTHLPEAGGPEVTYEPPPTAPT

SEQ ID NO: 628 - protein, 112 aa, synthetic construct
EAETRECLFFNANWEKDRTNQTGVEPCYGDKDKRRHCFATWKNISGSIEIVKQGCWLDDFNCYDRQECVATEENPQVYFCCCEGNFCNERFTHLPEAGGPEVTYEPPPTAPT

SEQ ID NO: 629 - protein, 113 aa, synthetic construct
GEAETRECLFFNANWEKDRTNQTGVEPCYGDKDKRRHCFATWKNISGSIEIVKQGCWLDDFNCYDRQECVATEENPQVYFCCCEGNFCNERFTHLPEAGGPEVTYEPPPTAPT

SEQ ID NO: 630 - protein, 114 aa, synthetic construct
RGEAETRECLFFNANWEKDRTNQTGVEPCYGDKDKRRHCFATWKNISGSIEIVKQGCWLDDFNCYDRQECVATEENPQVYFCCCEGNFCNERFTHLPEAGGPEVTYEPPPTAPT

SEQ ID NO: 631 - protein, 115 aa, synthetic construct
GRGEAETRECLFFNANWEKDRTNQTGVEPCYGDKDKRRHCFATWKNISGSIEIVKQGCWLDDFNCYDRQECVATEENPQVYFCCCEGNFCNERFTHLPEAGGPEVTYEPPPTAPT

SEQ ID NO: 632 - protein, 116 aa, synthetic construct
SGRGEAETRECLFFNANWEKDRTNQTGVEPCYGDKDKRRHCFATWKNISGSIEIVKQGCWLDDFNCYDRQECVATEENPQVYFCCCEGNFCNERFTHLPEAGGPEVTYEPPPTAPT

SEQ ID NO: 633 - protein, 111 aa, synthetic construct
AETRECLFFNANWEKDRTNQTGVEPCYGDKDKRRHCFATWKNISGSIEIVKQGCWLDDINCYDRQECVATEENPQVYFCCCEGNFCNERFTHLPEAGGPEVTYEPPPTAPT

SEQ ID NO: 634 - protein, 112 aa, synthetic construct
EAETRECLFFNANWEKDRTNQTGVEPCYGDKDKRRHCFATWKNISGSIEIVKQGCWLDDINCYDRQECVATEENPQVYFCCCEGNFCNERFTHLPEAGGPEVTYEPPPTAPT

SEQ ID NO: 635 - protein, 113 aa, synthetic construct
GEAETRECLFFNANWEKDRTNQTGVEPCYGDKDKRRHCFATWKNISGSIEIVKQGCWLDDINCYDRQECVATEENPQVYFCCCEGNFCNERFTHLPEAGGPEVTYEPPPTAPT

SEQ ID NO: 636 - protein, 114 aa, synthetic construct
RGEAETRECLFFNANWEKDRTNQTGVEPCYGDKDKRRHCFATWKNISGSIEIVKQGCWLDDINCYDRQECVATEENPQVYFCCCEGNFCNERFTHLPEAGGPEVTYEPPPTAPT

SEQ ID NO: 637 - protein, 115 aa, synthetic construct
GRGEAETRECLFFNANWEKDRTNQTGVEPCYGDKDKRRHCFATWKNISGSIEIVKQGCWLDDINCYDRQECVATEENPQVYFCCCEGNFCNERFTHLPEAGGPEVTYEPPPTAPT

SEQ ID NO: 638 - protein, 116 aa, synthetic construct
SGRGEAETRECLFFNANWEKDRTNQTGVEPCYGDKDKRRHCFATWKNISGSIEIVKQGCWLDDINCYDRQECVATEENPQVYFCCCEGNFCNERFTHLPEAGGPEVTYEPPPTAPT

SEQ ID NO: 639 - protein, 111 aa, synthetic construct
AETRECLFFNANWEKDRTNQTGVEPCYGDKDKRRHCFATWKNISGSIEIVKQGCWLDDINCYDRTDCVEKKDSPEVYFCCCEGNFCNERFTHLPEAGGPEVTYEPPPTAPT

SEQ ID NO: 640 - protein, 112 aa, synthetic construct
EAETRECLFFNANWEKDRTNQTGVEPCYGDKDKRRHCFATWKNISGSIEIVKQGCWLDDINCYDRTDCVEKKDSPEVYFCCCEGNFCNERFTHLPEAGGPEVTYEPPPTAPT

SEQ ID NO: 641 - protein, 113 aa, synthetic construct
GEAETRECLFFNANWEKDRTNQTGVEPCYGDKDKRRHCFATWKNISGSIEIVKQGCWLDDINCYDRTDCVEKKDSPEVYFCCCEGNFCNERFTHLPEAGGPEVTYEPPPTAPT

SEQ ID NO: 642 - protein, 114 aa, synthetic construct
RGEAETRECLFFNANWEKDRTNQTGVEPCYGDKDKRRHCFATWKNISGSIEIVKQGCWLDDINCYDRTDCVEKKDSPEVYFCCCEGNFCNERFTHLPEAGGPEVTYEPPPTAPT

SEQ ID NO: 643 - protein, 115 aa, synthetic construct
GRGEAETRECLFFNANWEKDRTNQTGVEPCYGDKDKRRHCFATWKNISGSIEIVKQGCWLDDINCYDRTDCVEKKDSPEVYFCCCEGNFCNERFTHLPEAGGPEVTYEPPPTAPT

SEQ ID NO: 644 - protein, 116 aa, synthetic construct
SGRGEAETRECLFFNANWEKDRTNQTGVEPCYGDKDKRRHCFATWKNISGSIEIVKQGCWLDDINCYDRTDCVEKKDSPEVYFCCCEGNFCNERFTHLPEAGGPEVTYEPPPTAPT

SEQ ID NO: 645 - protein, 111 aa, synthetic construct
AETQECIYYNANWELERTNQSGLERCYGDKDKRRHCFATWKNISGSIEIVKQGCWLDDINCYDRQECVATEENPQVYFCCCEGNFCNERFTHLPEAGGPEVTYEPPPTAPT

SEQ ID NO: 646 - protein, 112 aa, synthetic construct
EAETQECIYYNANWELERTNQSGLERCYGDKDKRRHCFATWKNISGSIEIVKQGCWLDDINCYDRQECVATEENPQVYFCCCEGNFCNERFTHLPEAGGPEVTYEPPPTAPT

SEQ ID NO: 647 - protein, 113 aa, synthetic construct
GEAETQECIYYNANWELERTNQSGLERCYGDKDKRRHCFATWKNISGSIEIVKQGCWLDDINCYDRQECVATEENPQVYFCCCEGNFCNERFTHLPEAGGPEVTYEPPPTAPT

SEQ ID NO: 648 - protein, 114 aa, synthetic construct
RGEAETQECIYYNANWELERTNQSGLERCYGDKDKRRHCFATWKNISGSIEIVKQGCWLDDINCYDRQECVATEENPQVYFCCCEGNFCNERFTHLPEAGGPEVTYEPPPTAPT

SEQ ID NO: 649 - protein, 115 aa, synthetic construct
GRGEAETQECIYYNANWELERTNQSGLERCYGDKDKRRHCFATWKNISGSIEIVKQGCWLDDINCYDRQECVATEENPQVYFCCCEGNFCNERFTHLPEAGGPEVTYEPPPTAPT

SEQ ID NO: 650 - protein, 116 aa, synthetic construct
SGRGEAETQECIYYNANWELERTNQSGLERCYGDKDKRRHCFATWKNISGSIEIVKQGCWLDDINCYDRQECVATEENPQVYFCCCEGNFCNERFTHLPEAGGPEVTYEPPPTAPT

SEQ ID NO: 651 - protein, 111 aa, synthetic construct
AETRECIYYNANWELERTNQSGLERCYGDKDKRRHCFATWKNISGSIEIVKQGCWLDDINCYDRTDCVEKKDSPEVYFCCCEGNFCNERFTHLPEAGGPEVTYEPPPTAPT

SEQ ID NO: 652 - protein, 112 aa, synthetic construct
EAETRECIYYNANWELERTNQSGLERCYGDKDKRRHCFATWKNISGSIEIVKQGCWLDDINCYDRTDCVEKKDSPEVYFCCCEGNFCNERFTHLPEAGGPEVTYEPPPTAPT

SEQ ID NO: 653 - protein, 113 aa, synthetic construct
GEAETRECIYYNANWELERTNQSGLERCYGDKDKRRHCFATWKNISGSIEIVKQGCWLDDINCYDRTDCVEKKDSPEVYFCCCEGNFCNERFTHLPEAGGPEVTYEPPPTAPT

SEQ ID NO: 654 - protein, 114 aa, synthetic construct
RGEAETRECIYYNANWELERTNQSGLERCYGDKDKRRHCFATWKNISGSIEIVKQGCWLDDINCYDRTDCVEKKDSPEVYFCCCEGNFCNERFTHLPEAGGPEVTYEPPPTAPT

SEQ ID NO: 655 - protein, 115 aa, synthetic construct
GRGEAETRECIYYNANWELERTNQSGLERCYGDKDKRRHCFATWKNISGSIEIVKQGCWLDDINCYDRTDCVEKKDSPEVYFCCCEGNFCNERFTHLPEAGGPEVTYEPPPTAPT

SEQ ID NO: 656 - protein, 116 aa, synthetic construct
SGRGEAETRECIYYNANWELERTNQSGLERCYGDKDKRRHCFATWKNISGSIEIVKQGCWLDDINCYDRTDCVEKKDSPEVYFCCCEGNFCNERFTHLPEAGGPEVTYEPPPTAPT

SEQ ID NO: 657 - protein, 111 aa, synthetic construct
AETRECIYYNANWELERTNQSGLERCYGDKDKRRHCFATWKNISGSIEIVKQGCWLDDINCYDRTDCVEKKDSPEVYFCCCEGNMCNERFTHLPEAGGPEVTYEPPPTAPT

SEQ ID NO: 658 - protein, 112 aa, synthetic construct
EAETRECIYYNANWELERTNQSGLERCYGDKDKRRHCFATWKNISGSIEIVKQGCWLDDINCYDRTDCVEKKDSPEVYFCCCEGNMCNERFTHLPEAGGPEVTYEPPPTAPT

SEQ ID NO: 659 - protein, 113 aa, synthetic construct
GEAETRECIYYNANWELERTNQSGLERCYGDKDKRRHCFATWKNISGSIEIVKQGCWLDDINCYDRTDCVEKKDSPEVYFCCCEGNMCNERFTHLPEAGGPEVTYEPPPTAPT

SEQ ID NO: 660 - protein, 114 aa, synthetic construct
RGEAETRECIYYNANWELERTNQSGLERCYGDKDKRRHCFATWKNISGSIEIVKQGCWLDDINCYDRTDCVEKKDSPEVYFCCCEGNMCNERFTHLPEAGGPEVTYEPPPTAPT

SEQ ID NO: 661 - protein, 115 aa, synthetic construct
GRGEAETRECIYYNANWELERTNQSGLERCYGDKDKRRHCFATWKNISGSIEIVKQGCWLDDINCYDRTDCVEKKDSPEVYFCCCEGNMCNERFTHLPEAGGPEVTYEPPPTAPT

SEQ ID NO: 662 - protein, 116 aa, synthetic construct
SGRGEAETRECIYYNANWELERTNQSGLERCYGDKDKRRHCFATWKNISGSIEIVKQGCWLDDINCYDRTDCVEKKDSPEVYFCCCEGNMCNERFTHLPEAGGPEVTYEPPPTAPT

SEQ ID NO: 663 - protein, 111 aa, synthetic construct
AETRECIYYNANWELERTNQSGLERCEGEQDKRLHCFATWKNISGSIEIVKQGCWLDDINCYDRTDCVEKKDSPEVYFCCCEGNFCNERFTHLPEAGGPEVTYEPPPTAPT

SEQ ID NO: 664 - protein, 112 aa, synthetic construct
EAETRECIYYNANWELERTNQSGLERCEGEQDKRLHCFATWKNISGSIEIVKQGCWLDDINCYDRTDCVEKKDSPEVYFCCCEGNFCNERFTHLPEAGGPEVTYEPPPTAPT

SEQ ID NO: 665 - protein, 113 aa, synthetic construct
GEAETRECIYYNANWELERTNQSGLERCEGEQDKRLHCFATWKNISGSIEIVKQGCWLDDINCYDRTDCVEKKDSPEVYFCCCEGNFCNERFTHLPEAGGPEVTYEPPPTAPT

SEQ ID NO: 666 - protein, 114 aa, synthetic construct
RGEAETRECIYYNANWELERTNQSGLERCEGEQDKRLHCFATWKNISGSIEIVKQGCWLDDINCYDRTDCVEKKDSPEVYFCCCEGNFCNERFTHLPEAGGPEVTYEPPPTAPT

SEQ ID NO: 667 - protein, 115 aa, synthetic construct
GRGEAETRECIYYNANWELERTNQSGLERCEGEQDKRLHCFATWKNISGSIEIVKQGCWLDDINCYDRTDCVEKKDSPEVYFCCCEGNFCNERFTHLPEAGGPEVTYEPPPTAPT

SEQ ID NO: 668 - protein, 116 aa, synthetic construct
SGRGEAETRECIYYNANWELERTNQSGLERCEGEQDKRLHCFATWKNISGSIEIVKQGCWLDDINCYDRTDCVEKKDSPEVYFCCCEGNFCNERFTHLPEAGGPEVTYEPPPTAPT

SEQ ID NO: 669 - protein, 111 aa, synthetic construct
AETRECIYYNANWELERTNQSGLERCEGEQDKRLHCFATWKNISGSIEIVKQGCWLDDINCYDRTDCVATEENPQVYFCCCEGNFCNERFTHLPEAGGPEVTYEPPPTAPT

SEQ ID NO: 670 - protein, 112 aa, synthetic construct
EAETRECIYYNANWELERTNQSGLERCEGEQDKRLHCFATWKNISGSIEIVKQGCWLDDINCYDRTDCVATEENPQVYFCCCEGNFCNERFTHLPEAGGPEVTYEPPPTAPT

SEQ ID NO: 671 - protein, 113 aa, synthetic construct
GEAETRECIYYNANWELERTNQSGLERCEGEQDKRLHCFATWKNISGSIEIVKQGCWLDDINCYDRTDCVATEENPQVYFCCCEGNFCNERFTHLPEAGGPEVTYEPPPTAPT

SEQ ID NO: 672 - protein, 114 aa, synthetic construct
RGEAETRECIYYNANWELERTNQSGLERCEGEQDKRLHCFATWKNISGSIEIVKQGCWLDDINCYDRTDCVATEENPQVYFCCCEGNFCNERFTHLPEAGGPEVTYEPPPTAPT

SEQ ID NO: 673 - protein, 115 aa, synthetic construct
GRGEAETRECIYYNANWELERTNQSGLERCEGEQDKRLHCFATWKNISGSIEIVKQGCWLDDINCYDRTDCVATEENPQVYFCCCEGNFCNERFTHLPEAGGPEVTYEPPPTAPT

SEQ ID NO: 674 - protein, 116 aa, synthetic construct
SGRGEAETRECIYYNANWELERTNQSGLERCEGEQDKRLHCFATWKNISGSIEIVKQGCWLDDINCYDRTDCVATEENPQVYFCCCEGNFCNERFTHLPEAGGPEVTYEPPPTAPT

SEQ ID NO: 675 - protein, 111 aa, synthetic construct
AETRECIYYNANWELERTNQSGLERCEGEQDKRLHCFATWKNISGSIEIVKQGCWLDDFNCYDRTDCVATEENPQVYFCCCEGNFCNERFTHLPEAGGPEVTYEPPPTAPT

SEQ ID NO: 676 - protein, 112 aa, synthetic construct
EAETRECIYYNANWELERTNQSGLERCEGEQDKRLHCFATWKNISGSIEIVKQGCWLDDFNCYDRTDCVATEENPQVYFCCCEGNFCNERFTHLPEAGGPEVTYEPPPTAPT

SEQ ID NO: 677 - protein, 113 aa, synthetic construct
GEAETRECIYYNANWELERTNQSGLERCEGEQDKRLHCFATWKNISGSIEIVKQGCWLDDFNCYDRTDCVATEENPQVYFCCCEGNFCNERFTHLPEAGGPEVTYEPPPTAPT

SEQ ID NO: 678 - protein, 114 aa, synthetic construct
RGEAETRECIYYNANWELERTNQSGLERCEGEQDKRLHCFATWKNISGSIEIVKQGCWLDDFNCYDRTDCVATEENPQVYFCCCEGNFCNERFTHLPEAGGPEVTYEPPPTAPT

SEQ ID NO: 679 - protein, 115 aa, synthetic construct
GRGEAETRECIYYNANWELERTNQSGLERCEGEQDKRLHCFATWKNISGSIEIVKQGCWLDDFNCYDRTDCVATEENPQVYFCCCEGNFCNERFTHLPEAGGPEVTYEPPPTAPT

SEQ ID NO: 680 - protein, 116 aa, synthetic construct
SGRGEAETRECIYYNANWELERTNQSGLERCEGEQDKRLHCFATWKNISGSIEIVKQGCWLDDFNCYDRTDCVATEENPQVYFCCCEGNFCNERFTHLPEAGGPEVTYEPPPTAPT

SEQ ID NO: 681 - protein, 111 aa, synthetic construct
AETRECIYYNANWELERTNQSGLERCEGEQDKRLHCFATWKNISGSIEIVKQGCWLDDFNCYDRQECVATEENPQVYFCCCEGNFCNERFTHLPEAGGPEVTYEPPPTAPT

SEQ ID NO: 682 - protein, 112 aa, synthetic construct
EAETRECIYYNANWELERTNQSGLERCEGEQDKRLHCFATWKNISGSIEIVKQGCWLDDFNCYDRQECVATEENPQVYFCCCEGNFCNERFTHLPEAGGPEVTYEPPPTAPT

SEQ ID NO: 683 - protein, 113 aa, synthetic construct
GEAETRECIYYNANWELERTNQSGLERCEGEQDKRLHCFATWKNISGSIEIVKQGCWLDDFNCYDRQECVATEENPQVYFCCCEGNFCNERFTHLPEAGGPEVTYEPPPTAPT

SEQ ID NO: 684 - protein, 114 aa, synthetic construct
RGEAETRECIYYNANWELERTNQSGLERCEGEQDKRLHCFATWKNISGSIEIVKQGCWLDDFNCYDRQECVATEENPQVYFCCCEGNFCNERFTHLPEAGGPEVTYEPPPTAPT

SEQ ID NO: 685 - protein, 115 aa, synthetic construct
GRGEAETRECIYYNANWELERTNQSGLERCEGEQDKRLHCFATWKNISGSIEIVKQGCWLDDFNCYDRQECVATEENPQVYFCCCEGNFCNERFTHLPEAGGPEVTYEPPPTAPT

SEQ ID NO: 686 - protein, 116 aa, synthetic construct
SGRGEAETRECIYYNANWELERTNQSGLERCEGEQDKRLHCFATWKNISGSIEIVKQGCWLDDFNCYDRQECVATEENPQVYFCCCEGNFCNERFTHLPEAGGPEVTYEPPPTAPT

SEQ ID NO: 687 - protein, 111 aa, synthetic construct
AETQECIYYNANWELERTNQSGLERCYGDKDKRRHCYASWRNSSGTIELVKKGCWLDDINCYDRTDCVEKKDSPEVYFCCCEGNFCNERFTHLPEAGGPEVTYEPPPTAPT

SEQ ID NO: 688 - protein, 112 aa, synthetic construct
EAETQECIYYNANWELERTNQSGLERCYGDKDKRRHCYASWRNSSGTIELVKKGCWLDDINCYDRTDCVEKKDSPEVYFCCCEGNFCNERFTHLPEAGGPEVTYEPPPTAPT

SEQ ID NO: 689 - protein, 113 aa, synthetic construct
GEAETQECIYYNANWELERTNQSGLERCYGDKDKRRHCYASWRNSSGTIELVKKGCWLDDINCYDRTDCVEKKDSPEVYFCCCEGNFCNERFTHLPEAGGPEVTYEPPPTAPT

SEQ ID NO: 690 - protein, 114 aa, synthetic construct
RGEAETQECIYYNANWELERTNQSGLERCYGDKDKRRHCYASWRNSSGTIELVKKGCWLDDINCYDRTDCVEKKDSPEVYFCCCEGNFCNERFTHLPEAGGPEVTYEPPPTAPT

SEQ ID NO: 691 - protein, 115 aa, synthetic construct
GRGEAETQECIYYNANWELERTNQSGLERCYGDKDKRRHCYASWRNSSGTIELVKKGCWLDDINCYDRTDCVEKKDSPEVYFCCCEGNFCNERFTHLPEAGGPEVTYEPPPTAPT

SEQ ID NO: 692 - protein, 116 aa, synthetic construct
SGRGEAETQECIYYNANWELERTNQSGLERCYGDKDKRRHCYASWRNSSGTIELVKKGCWLDDINCYDRTDCVEKKDSPEVYFCCCEGNFCNERFTHLPEAGGPEVTYEPPPTAPT

SEQ ID NO: 693 - protein, 111 aa, synthetic construct
AETQECIYYNANWELERTNQSGLERCYGDKDKRRHCYASWRNSSGTIELVKKGCWLDDINCYDRTDCVEKKDSPEVYFCCCEGNMCNERFTHLPEAGGPEVTYEPPPTAPT

SEQ ID NO: 694 - protein, 112 aa, synthetic construct
EAETQECIYYNANWELERTNQSGLERCYGDKDKRRHCYASWRNSSGTIELVKKGCWLDDINCYDRTDCVEKKDSPEVYFCCCEGNMCNERFTHLPEAGGPEVTYEPPPTAPT

SEQ ID NO: 695 - protein, 113 aa, synthetic construct
GEAETQECIYYNANWELERTNQSGLERCYGDKDKRRHCYASWRNSSGTIELVKKGCWLDDINCYDRTDCVEKKDSPEVYFCCCEGNMCNERFTHLPEAGGPEVTYEPPPTAPT

SEQ ID NO: 696 - protein, 114 aa, synthetic construct
RGEAETQECIYYNANWELERTNQSGLERCYGDKDKRRHCYASWRNSSGTIELVKKGCWLDDINCYDRTDCVEKKDSPEVYFCCCEGNMCNERFTHLPEAGGPEVTYEPPPTAPT

SEQ ID NO: 697 - protein, 115 aa, synthetic construct
GRGEAETQECIYYNANWELERTNQSGLERCYGDKDKRRHCYASWRNSSGTIELVKKGCWLDDINCYDRTDCVEKKDSPEVYFCCCEGNMCNERFTHLPEAGGPEVTYEPPPTAPT

SEQ ID NO: 698 - protein, 116 aa, synthetic construct
SGRGEAETQECIYYNANWELERTNQSGLERCYGDKDKRRHCYASWRNSSGTIELVKKGCWLDDINCYDRTDCVEKKDSPEVYFCCCEGNMCNERFTHLPEAGGPEVTYEPPPTAPT

SEQ ID NO: 699 - protein, 111 aa, synthetic construct
AETQECIYYNANWELERTNQSGLERCYGDKDKRRHCFATWKNISGSIEIVKQGCWLDDINCYDRTDCVEKKDSPEVYFCCCEGNMCNERFTHLPEAGGPEVTYEPPPTAPT

SEQ ID NO: 700 - protein, 112 aa, synthetic construct
EAETQECIYYNANWELERTNQSGLERCYGDKDKRRHCFATWKNISGSIEIVKQGCWLDDINCYDRTDCVEKKDSPEVYFCCCEGNMCNERFTHLPEAGGPEVTYEPPPTAPT

SEQ ID NO: 701 - protein, 113 aa, synthetic construct
GEAETQECIYYNANWELERTNQSGLERCYGDKDKRRHCFATWKNISGSIEIVKQGCWLDDINCYDRTDCVEKKDSPEVYFCCCEGNMCNERFTHLPEAGGPEVTYEPPPTAPT

SEQ ID NO: 702 - protein, 114 aa, synthetic construct
RGEAETQECIYYNANWELERTNQSGLERCYGDKDKRRHCFATWKNISGSIEIVKQGCWLDDINCYDRTDCVEKKDSPEVYFCCCEGNMCNERFTHLPEAGGPEVTYEPPPTAPT

SEQ ID NO: 703 - protein, 115 aa, synthetic construct
GRGEAETQECIYYNANWELERTNQSGLERCYGDKDKRRHCFATWKNISGSIEIVKQGCWLDDINCYDRTDCVEKKDSPEVYFCCCEGNMCNERFTHLPEAGGPEVTYEPPPTAPT

SEQ ID NO: 704 - protein, 116 aa, synthetic construct
SGRGEAETQECIYYNANWELERTNQSGLERCYGDKDKRRHCFATWKNISGSIEIVKQGCWLDDINCYDRTDCVEKKDSPEVYFCCCEGNMCNERFTHLPEAGGPEVTYEPPPTAPT

SEQ ID NO: 705 - protein, 111 aa, synthetic construct
AETQECIYYNANWELERTNQSGLERCYGDKDKRRHCFATWKNISGSIEIVKQGCWLDDINCYDRTDCVEKKDSPEVYFCCCEGNFCNERFTHLPEAGGPEVTYEPPPTAPT

SEQ ID NO: 706 - protein, 112 aa, synthetic construct
EAETQECIYYNANWELERTNQSGLERCYGDKDKRRHCFATWKNISGSIEIVKQGCWLDDINCYDRTDCVEKKDSPEVYFCCCEGNFCNERFTHLPEAGGPEVTYEPPPTAPT

SEQ ID NO: 707 - protein, 113 aa, synthetic construct
GEAETQECIYYNANWELERTNQSGLERCYGDKDKRRHCFATWKNISGSIEIVKQGCWLDDINCYDRTDCVEKKDSPEVYFCCCEGNFCNERFTHLPEAGGPEVTYEPPPTAPT

SEQ ID NO: 708 - protein, 114 aa, synthetic construct
RGEAETQECIYYNANWELERTNQSGLERCYGDKDKRRHCFATWKNISGSIEIVKQGCWLDDINCYDRTDCVEKKDSPEVYFCCCEGNFCNERFTHLPEAGGPEVTYEPPPTAPT

SEQ ID NO: 709 - protein, 115 aa, synthetic construct
GRGEAETQECIYYNANWELERTNQSGLERCYGDKDKRRHCFATWKNISGSIEIVKQGCWLDDINCYDRTDCVEKKDSPEVYFCCCEGNFCNERFTHLPEAGGPEVTYEPPPTAPT

SEQ ID NO: 710 - protein, 116 aa, synthetic construct
SGRGEAETQECIYYNANWELERTNQSGLERCYGDKDKRRHCFATWKNISGSIEIVKQGCWLDDINCYDRTDCVEKKDSPEVYFCCCEGNFCNERFTHLPEAGGPEVTYEPPPTAPT

SEQ ID NO: 711 - protein, 111 aa, synthetic construct
AETRECLFFNANWEKDRTNQTGVEPCEGEQDKRLHCFATWKNISGSIEIVKQGCWLDDINCYDRTDCVEKKDSPEVYFCCCEGNFCNERFTHLPEAGGPEVTYEPPPTAPT

SEQ ID NO: 712 - protein, 112 aa, synthetic construct
EAETRECLFFNANWEKDRTNQTGVEPCEGEQDKRLHCFATWKNISGSIEIVKQGCWLDDINCYDRTDCVEKKDSPEVYFCCCEGNFCNERFTHLPEAGGPEVTYEPPPTAPT

SEQ ID NO: 713 - protein, 113 aa, synthetic construct
GEAETRECLFFNANWEKDRTNQTGVEPCEGEQDKRLHCFATWKNISGSIEIVKQGCWLDDINCYDRTDCVEKKDSPEVYFCCCEGNFCNERFTHLPEAGGPEVTYEPPPTAPT

SEQ ID NO: 714 - protein, 114 aa, synthetic construct
RGEAETRECLFFNANWEKDRTNQTGVEPCEGEQDKRLHCFATWKNISGSIEIVKQGCWLDDINCYDRTDCVEKKDSPEVYFCCCEGNFCNERFTHLPEAGGPEVTYEPPPTAPT

SEQ ID NO: 715 - protein, 115 aa, synthetic construct
GRGEAETRECLFFNANWEKDRTNQTGVEPCEGEQDKRLHCFATWKNISGSIEIVKQGCWLDDINCYDRTDCVEKKDSPEVYFCCCEGNFCNERFTHLPEAGGPEVTYEPPPTAPT

SEQ ID NO: 716 - protein, 116 aa, synthetic construct
SGRGEAETRECLFFNANWEKDRTNQTGVEPCEGEQDKRLHCFATWKNISGSIEIVKQGCWLDDINCYDRTDCVEKKDSPEVYFCCCEGNFCNERFTHLPEAGGPEVTYEPPPTAPT

SEQ ID NO: 717 - protein, 111 aa, synthetic construct
AETRECLFFNANWEKDRTNQSGVEPCEGEQDKRLHCYASWRNSSGTIELVKKGCWLDDINCYDRTDCVEKKDSPEVYFCCCEGNFCNERFTHLPEAGGPEVTYEPPPTAPT

SEQ ID NO: 718 - protein, 112 aa, synthetic construct
EAETRECLFFNANWEKDRTNQSGVEPCEGEQDKRLHCYASWRNSSGTIELVKKGCWLDDINCYDRTDCVEKKDSPEVYFCCCEGNFCNERFTHLPEAGGPEVTYEPPPTAPT

SEQ ID NO: 719 - protein, 113 aa, synthetic construct
GEAETRECLFFNANWEKDRTNQSGVEPCEGEQDKRLHCYASWRNSSGTIELVKKGCWLDDINCYDRTDCVEKKDSPEVYFCCCEGNFCNERFTHLPEAGGPEVTYEPPPTAPT

SEQ ID NO: 720 - protein, 114 aa, synthetic construct
RGEAETRECLFFNANWEKDRTNQSGVEPCEGEQDKRLHCYASWRNSSGTIELVKKGCWLDDINCYDRTDCVEKKDSPEVYFCCCEGNFCNERFTHLPEAGGPEVTYEPPPTAPT

SEQ ID NO: 721 - protein, 115 aa, synthetic construct
GRGEAETRECLFFNANWEKDRTNQSGVEPCEGEQDKRLHCYASWRNSSGTIELVKKGCWLDDINCYDRTDCVEKKDSPEVYFCCCEGNFCNERFTHLPEAGGPEVTYEPPPTAPT

SEQ ID NO: 722 - protein, 116 aa, synthetic construct
SGRGEAETRECLFFNANWEKDRTNQSGVEPCEGEQDKRLHCYASWRNSSGTIELVKKGCWLDDINCYDRTDCVEKKDSPEVYFCCCEGNFCNERFTHLPEAGGPEVTYEPPPTAPT

SEQ ID NO: 723 - protein, 111 aa, synthetic construct
AETRECLFFNANWEKDRTNQSGVEPCYGDKDKRRHCYASWRNSSGTIELVKKGCWLDDINCYDRTDCVEKKDSPEVYFCCCEGNFCNERFTHLPEAGGPEVTYEPPPTAPT

SEQ ID NO: 724 - protein, 112 aa, synthetic construct
EAETRECLFFNANWEKDRTNQSGVEPCYGDKDKRRHCYASWRNSSGTIELVKKGCWLDDINCYDRTDCVEKKDSPEVYFCCCEGNFCNERFTHLPEAGGPEVTYEPPPTAPT

SEQ ID NO: 725 - protein, 113 aa, synthetic construct
GEAETRECLFFNANWEKDRTNQSGVEPCYGDKDKRRHCYASWRNSSGTIELVKKGCWLDDINCYDRTDCVEKKDSPEVYFCCCEGNFCNERFTHLPEAGGPEVTYEPPPTAPT

SEQ ID NO: 726 - protein, 114 aa, synthetic construct
RGEAETRECLFFNANWEKDRTNQSGVEPCYGDKDKRRHCYASWRNSSGTIELVKKGCWLDDINCYDRTDCVEKKDSPEVYFCCCEGNFCNERFTHLPEAGGPEVTYEPPPTAPT

SEQ ID NO: 727 - protein, 115 aa, synthetic construct
GRGEAETRECLFFNANWEKDRTNQSGVEPCYGDKDKRRHCYASWRNSSGTIELVKKGCWLDDINCYDRTDCVEKKDSPEVYFCCCEGNFCNERFTHLPEAGGPEVTYEPPPTAPT

SEQ ID NO: 728 - protein, 116 aa, synthetic construct
SGRGEAETRECLFFNANWEKDRTNQSGVEPCYGDKDKRRHCYASWRNSSGTIELVKKGCWLDDINCYDRTDCVEKKDSPEVYFCCCEGNFCNERFTHLPEAGGPEVTYEPPPTAPT

SEQ ID NO: 729 - protein, 111 aa, synthetic construct
AETRECIYYNANWELERTNQSGLERCYGDKDKRRHCYASWRNSSGTIELVKKGCWLDDFNCYDRTDCVATEENPQVYFCCCEGNFCNERFTHLPEAGGPEVTYEPPPTAPT

SEQ ID NO: 730 - protein, 112 aa, synthetic construct
EAETRECIYYNANWELERTNQSGLERCYGDKDKRRHCYASWRNSSGTIELVKKGCWLDDFNCYDRTDCVATEENPQVYFCCCEGNFCNERFTHLPEAGGPEVTYEPPPTAPT

SEQ ID NO: 731 - protein, 113 aa, synthetic construct
GEAETRECIYYNANWELERTNQSGLERCYGDKDKRRHCYASWRNSSGTIELVKKGCWLDDFNCYDRTDCVATEENPQVYFCCCEGNFCNERFTHLPEAGGPEVTYEPPPTAPT

SEQ ID NO: 732 - protein, 114 aa, synthetic construct
RGEAETRECIYYNANWELERTNQSGLERCYGDKDKRRHCYASWRNSSGTIELVKKGCWLDDFNCYDRTDCVATEENPQVYFCCCEGNFCNERFTHLPEAGGPEVTYEPPPTAPT

SEQ ID NO: 733 - protein, 115 aa, synthetic construct
GRGEAETRECIYYNANWELERTNQSGLERCYGDKDKRRHCYASWRNSSGTIELVKKGCWLDDFNCYDRTDCVATEENPQVYFCCCEGNFCNERFTHLPEAGGPEVTYEPPPTAPT

SEQ ID NO: 734 - protein, 116 aa, synthetic construct
SGRGEAETRECIYYNANWELERTNQSGLERCYGDKDKRRHCYASWRNSSGTIELVKKGCWLDDFNCYDRTDCVATEENPQVYFCCCEGNFCNERFTHLPEAGGPEVTYEPPPTAPT

SEQ ID NO: 735 - protein, 111 aa, synthetic construct
AETRECIYYNANWELERTNQSGLERCYGDKDKRRHCYASWRNSSGTIELVKQGCWLDDFNCYDRTDCVATEENPQVYFCCCEGNFCNERFTHLPEAGGPEVTYEPPPTAPT

SEQ ID NO: 736 - protein, 112 aa, synthetic construct
EAETRECIYYNANWELERTNQSGLERCYGDKDKRRHCYASWRNSSGTIELVKQGCWLDDFNCYDRTDCVATEENPQVYFCCCEGNFCNERFTHLPEAGGPEVTYEPPPTAPT

SEQ ID NO: 737 - protein, 113 aa, synthetic construct
GEAETRECIYYNANWELERTNQSGLERCYGDKDKRRHCYASWRNSSGTIELVKQGCWLDDFNCYDRTDCVATEENPQVYFCCCEGNFCNERFTHLPEAGGPEVTYEPPPTAPT

SEQ ID NO: 738 - protein, 114 aa, synthetic construct
RGEAETRECIYYNANWELERTNQSGLERCYGDKDKRRHCYASWRNSSGTIELVKQGCWLDDFNCYDRTDCVATEENPQVYFCCCEGNFCNERFTHLPEAGGPEVTYEPPPTAPT

SEQ ID NO: 739 - protein, 115 aa, synthetic construct
GRGEAETRECIYYNANWELERTNQSGLERCYGDKDKRRHCYASWRNSSGTIELVKQGCWLDDFNCYDRTDCVATEENPQVYFCCCEGNFCNERFTHLPEAGGPEVTYEPPPTAPT

SEQ ID NO: 740 - protein, 116 aa, synthetic construct
SGRGEAETRECIYYNANWELERTNQSGLERCYGDKDKRRHCYASWRNSSGTIELVKQGCWLDDFNCYDRTDCVATEENPQVYFCCCEGNFCNERFTHLPEAGGPEVTYEPPPTAPT

SEQ ID NO: 741 - protein, 111 aa, synthetic construct
AETRECIYYNANWELERTNQSGLERCYGDKDKRRHCYASWRNSSGTIEIVKKGCWLDDFNCYDRTDCVATEENPQVYFCCCEGNFCNERFTHLPEAGGPEVTYEPPPTAPT

SEQ ID NO: 742 - protein, 112 aa, synthetic construct
EAETRECIYYNANWELERTNQSGLERCYGDKDKRRHCYASWRNSSGTIEIVKKGCWLDDFNCYDRTDCVATEENPQVYFCCCEGNFCNERFTHLPEAGGPEVTYEPPPTAPT

SEQ ID NO: 743 - protein, 113 aa, synthetic construct
GEAETRECIYYNANWELERTNQSGLERCYGDKDKRRHCYASWRNSSGTIEIVKKGCWLDDFNCYDRTDCVATEENPQVYFCCCEGNFCNERFTHLPEAGGPEVTYEPPPTAPT

SEQ ID NO: 744 - protein, 114 aa, synthetic construct
RGEAETRECIYYNANWELERTNQSGLERCYGDKDKRRHCYASWRNSSGTIEIVKKGCWLDDFNCYDRTDCVATEENPQVYFCCCEGNFCNERFTHLPEAGGPEVTYEPPPTAPT

SEQ ID NO: 745 - protein, 115 aa, synthetic construct
GRGEAETRECIYYNANWELERTNQSGLERCYGDKDKRRHCYASWRNSSGTIEIVKKGCWLDDFNCYDRTDCVATEENPQVYFCCCEGNFCNERFTHLPEAGGPEVTYEPPPTAPT

SEQ ID NO: 746 - protein, 116 aa, synthetic construct
SGRGEAETRECIYYNANWELERTNQSGLERCYGDKDKRRHCYASWRNSSGTIEIVKKGCWLDDFNCYDRTDCVATEENPQVYFCCCEGNFCNERFTHLPEAGGPEVTYEPPPTAPT

SEQ ID NO: 747 - protein, 111 aa, synthetic construct
AETRECIYYNANWELERTNQSGLERCYGDKDKRRHCYASWRNSSGSIELVKKGCWLDDFNCYDRTDCVATEENPQVYFCCCEGNFCNERFTHLPEAGGPEVTYEPPPTAPT

SEQ ID NO: 748 - protein, 112 aa, synthetic construct
EAETRECIYYNANWELERTNQSGLERCYGDKDKRRHCYASWRNSSGSIELVKKGCWLDDFNCYDRTDCVATEENPQVYFCCCEGNFCNERFTHLPEAGGPEVTYEPPPTAPT

SEQ ID NO: 749 - protein, 113 aa, synthetic construct
GEAETRECIYYNANWELERTNQSGLERCYGDKDKRRHCYASWRNSSGSIELVKKGCWLDDFNCYDRTDCVATEENPQVYFCCCEGNFCNERFTHLPEAGGPEVTYEPPPTAPT

SEQ ID NO: 750 - protein, 114 aa, synthetic construct
RGEAETRECIYYNANWELERTNQSGLERCYGDKDKRRHCYASWRNSSGSIELVKKGCWLDDFNCYDRTDCVATEENPQVYFCCCEGNFCNERFTHLPEAGGPEVTYEPPPTAPT

SEQ ID NO: 751 - protein, 115 aa, synthetic construct
GRGEAETRECIYYNANWELERTNQSGLERCYGDKDKRRHCYASWRNSSGSIELVKKGCWLDDFNCYDRTDCVATEENPQVYFCCCEGNFCNERFTHLPEAGGPEVTYEPPPTAPT

SEQ ID NO: 752 - protein, 116 aa, synthetic construct
SGRGEAETRECIYYNANWELERTNQSGLERCYGDKDKRRHCYASWRNSSGSIELVKKGCWLDDFNCYDRTDCVATEENPQVYFCCCEGNFCNERFTHLPEAGGPEVTYEPPPTAPT

SEQ ID NO: 753 - protein, 111 aa, synthetic construct
AETRECIYYNANWELERTNQSGLERCYGDKDKRRHCYASWRNSSGSIEIVKKGCWLDDFNCYDRTDCVATEENPQVYFCCCEGNFCNERFTHLPEAGGPEVTYEPPPTAPT

SEQ ID NO: 754 - protein, 112 aa, synthetic construct
EAETRECIYYNANWELERTNQSGLERCYGDKDKRRHCYASWRNSSGSIEIVKKGCWLDDFNCYDRTDCVATEENPQVYFCCCEGNFCNERFTHLPEAGGPEVTYEPPPTAPT

SEQ ID NO: 755 - protein, 113 aa, synthetic construct
GEAETRECIYYNANWELERTNQSGLERCYGDKDKRRHCYASWRNSSGSIEIVKKGCWLDDFNCYDRTDCVATEENPQVYFCCCEGNFCNERFTHLPEAGGPEVTYEPPPTAPT

SEQ ID NO: 756 - protein, 114 aa, synthetic construct
RGEAETRECIYYNANWELERTNQSGLERCYGDKDKRRHCYASWRNSSGSIEIVKKGCWLDDFNCYDRTDCVATEENPQVYFCCCEGNFCNERFTHLPEAGGPEVTYEPPPTAPT

SEQ ID NO: 757 - protein, 115 aa, synthetic construct
GRGEAETRECIYYNANWELERTNQSGLERCYGDKDKRRHCYASWRNSSGSIEIVKKGCWLDDFNCYDRTDCVATEENPQVYFCCCEGNFCNERFTHLPEAGGPEVTYEPPPTAPT

SEQ ID NO: 758 - protein, 116 aa, synthetic construct
SGRGEAETRECIYYNANWELERTNQSGLERCYGDKDKRRHCYASWRNSSGSIEIVKKGCWLDDFNCYDRTDCVATEENPQVYFCCCEGNFCNERFTHLPEAGGPEVTYEPPPTAPT

SEQ ID NO: 759 - protein, 111 aa, synthetic construct
AETRECIYYNANWELERTNQSGLERCYGDKDKRRHCYASWRNSSGSIEIVKQGCWLDDFNCYDRTDCVATEENPQVYFCCCEGNFCNERFTHLPEAGGPEVTYEPPPTAPT

SEQ ID NO: 760 - protein, 112 aa, synthetic construct
EAETRECIYYNANWELERTNQSGLERCYGDKDKRRHCYASWRNSSGSIEIVKQGCWLDDFNCYDRTDCVATEENPQVYFCCCEGNFCNERFTHLPEAGGPEVTYEPPPTAPT

SEQ ID NO: 761 - protein, 113 aa, synthetic construct
GEAETRECIYYNANWELERTNQSGLERCYGDKDKRRHCYASWRNSSGSIEIVKQGCWLDDFNCYDRTDCVATEENPQVYFCCCEGNFCNERFTHLPEAGGPEVTYEPPPTAPT

SEQ ID NO: 762 - protein, 114 aa, synthetic construct
RGEAETRECIYYNANWELERTNQSGLERCYGDKDKRRHCYASWRNSSGSIEIVKQGCWLDDFNCYDRTDCVATEENPQVYFCCCEGNFCNERFTHLPEAGGPEVTYEPPPTAPT

SEQ ID NO: 763 - protein, 115 aa, synthetic construct
GRGEAETRECIYYNANWELERTNQSGLERCYGDKDKRRHCYASWRNSSGSIEIVKQGCWLDDFNCYDRTDCVATEENPQVYFCCCEGNFCNERFTHLPEAGGPEVTYEPPPTAPT

SEQ ID NO: 764 - protein, 116 aa, synthetic construct
SGRGEAETRECIYYNANWELERTNQSGLERCYGDKDKRRHCYASWRNSSGSIEIVKQGCWLDDFNCYDRTDCVATEENPQVYFCCCEGNFCNERFTHLPEAGGPEVTYEPPPTAPT

SEQ ID NO: 765 - protein, 111 aa, synthetic construct; identical to SEQ ID NO: 579

SEQ ID NO: 766 - protein, 112 aa, synthetic construct; identical to SEQ ID NO: 580

SEQ ID NO: 767 - protein, 113 aa, synthetic construct; identical to SEQ ID NO: 581

SEQ ID NO: 768 - protein, 114 aa, synthetic construct; identical to SEQ ID NO: 582

SEQ ID NO: 769 - protein, 115 aa, synthetic construct; identical to SEQ ID NO: 583

SEQ ID NO: 770 - protein, 116 aa, synthetic construct; identical to SEQ ID NO: 584

SEQ ID NO: 771 - protein, 111 aa, synthetic construct
AETRECIYYNANWELERTNQSGLERCEGEQDKRLHCYASWRNSSGTIELVKKGCWLDDFNCYDRQECVATEENPQVYFCCCEGNFCNEKFSYFPEMEVTQPTSNPVTPKPP

SEQ ID NO: 772 - protein, 112 aa, synthetic construct
EAETRECIYYNANWELERTNQSGLERCEGEQDKRLHCYASWRNSSGTIELVKKGCWLDDFNCYDRQECVATEENPQVYFCCCEGNFCNEKFSYFPEMEVTQPTSNPVTPKPP

SEQ ID NO: 773 - protein, 113 aa, synthetic construct
GEAETRECIYYNANWELERTNQSGLERCEGEQDKRLHCYASWRNSSGTIELVKKGCWLDDFNCYDRQECVATEENPQVYFCCCEGNFCNEKFSYFPEMEVTQPTSNPVTPKPP

SEQ ID NO: 774 - protein, 114 aa, synthetic construct
RGEAETRECIYYNANWELERTNQSGLERCEGEQDKRLHCYASWRNSSGTIELVKKGCWLDDFNCYDRQECVATEENPQVYFCCCEGNFCNEKFSYFPEMEVTQPTSNPVTPKPP

SEQ ID NO: 775 - protein, 115 aa, synthetic construct
GRGEAETRECIYYNANWELERTNQSGLERCEGEQDKRLHCYASWRNSSGTIELVKKGCWLDDFNCYDRQECVATEENPQVYFCCCEGNFCNEKFSYFPEMEVTQPTSNPVTPKPP

SEQ ID NO: 776 - protein, 116 aa, synthetic construct
SGRGEAETRECIYYNANWELERTNQSGLERCEGEQDKRLHCYASWRNSSGTIELVKKGCWLDDFNCYDRQECVATEENPQVYFCCCEGNFCNEKFSYFPEMEVTQPTSNPVTPKPP

SEQ ID NO: 777 - protein, 111 aa, synthetic construct
AETRECIYYNANWELERTNQSGLERCEGEQDKRLHCYASWRNSSGTIELVKKGCWLDDFNCYDRQECVATEENPQVYFCCCEGNFCNEKFSYFPQMEVTQPTSNPVTPKPP

SEQ ID NO: 778 - protein, 112 aa, synthetic construct
EAETRECIYYNANWELERTNQSGLERCEGEQDKRLHCYASWRNSSGTIELVKKGCWLDDFNCYDRQECVATEENPQVYFCCCEGNFCNEKFSYFPQMEVTQPTSNPVTPKPP

SEQ ID NO: 779 - protein, 113 aa, synthetic construct
GEAETRECIYYNANWELERTNQSGLERCEGEQDKRLHCYASWRNSSGTIELVKKGCWLDDFNCYDRQECVATEENPQVYFCCCEGNFCNEKFSYFPQMEVTQPTSNPVTPKPP

SEQ ID NO: 780 - protein, 114 aa, synthetic construct
RGEAETRECIYYNANWELERTNQSGLERCEGEQDKRLHCYASWRNSSGTIELVKKGCWLDDFNCYDRQECVATEENPQVYFCCCEGNFCNEKFSYFPQMEVTQPTSNPVTPKPP

SEQ ID NO: 781 - protein, 115 aa, synthetic construct
GRGEAETRECIYYNANWELERTNQSGLERCEGEQDKRLHCYASWRNSSGTIELVKKGCWLDDFNCYDRQECVATEENPQVYFCCCEGNFCNEKFSYFPQMEVTQPTSNPVTPKPP

SEQ ID NO: 782 - protein, 116 aa, synthetic construct
SGRGEAETRECIYYNANWELERTNQSGLERCEGEQDKRLHCYASWRNSSGTIELVKKGCWLDDFNCYDRQECVATEENPQVYFCCCEGNFCNEKFSYFPQMEVTQPTSNPVTPKPP

SEQ ID NO: 783 - protein, 111 aa, synthetic construct
AETRECIYYNANWELERTNQSGLERCYGDKDKRRHCYASWRNSSGTIELVKKGCWLDDINCYDRTDCVEKKDSPEVYFCCCEGNFCNEKFSYFPEMEVTQPTSNPVTPKPP

SEQ ID NO: 784 - protein, 112 aa, synthetic construct
EAETRECIYYNANWELERTNQSGLERCYGDKDKRRHCYASWRNSSGTIELVKKGCWLDDINCYDRTDCVEKKDSPEVYFCCCEGNFCNEKFSYFPEMEVTQPTSNPVTPKPP

SEQ ID NO: 785 - protein, 113 aa, synthetic construct
GEAETRECIYYNANWELERTNQSGLERCYGDKDKRRHCYASWRNSSGTIELVKKGCWLDDINCYDRTDCVEKKDSPEVYFCCCEGNFCNEKFSYFPEMEVTQPTSNPVTPKPP

SEQ ID NO: 786 - protein, 114 aa, synthetic construct
RGEAETRECIYYNANWELERTNQSGLERCYGDKDKRRHCYASWRNSSGTIELVKKGCWLDDINCYDRTDCVEKKDSPEVYFCCCEGNFCNEKFSYFPEMEVTQPTSNPVTPKPP

SEQ ID NO: 787 - protein, 115 aa, synthetic construct
GRGEAETRECIYYNANWELERTNQSGLERCYGDKDKRRHCYASWRNSSGTIELVKKGCWLDDINCYDRTDCVEKKDSPEVYFCCCEGNFCNEKFSYFPEMEVTQPTSNPVTPKPP

SEQ ID NO: 788 - protein, 116 aa, synthetic construct
SGRGEAETRECIYYNANWELERTNQSGLERCYGDKDKRRHCYASWRNSSGTIELVKKGCWLDDINCYDRTDCVEKKDSPEVYFCCCEGNFCNEKFSYFPEMEVTQPTSNPVTPKPP

SEQ ID NO: 789 - protein, 111 aa, synthetic construct
AETRECIYYNANWELERTNQSGLERCYGDKDKRRHCYASWRNSSGTIELVKKGCWLDDINCYDRTDCVEKKDSPEVYFCCCEGNFCNEKFSYFPQMEVTQPTSNPVTPKPP

SEQ ID NO: 790 - protein, 112 aa, synthetic construct
EAETRECIYYNANWELERTNQSGLERCYGDKDKRRHCYASWRNSSGTIELVKKGCWLDDINCYDRTDCVEKKDSPEVYFCCCEGNFCNEKFSYFPQMEVTQPTSNPVTPKPP

SEQ ID NO: 791 - protein, 113 aa, synthetic construct
GEAETRECIYYNANWELERTNQSGLERCYGDKDKRRHCYASWRNSSGTIELVKKGCWLDDINCYDRTDCVEKKDSPEVYFCCCEGNFCNEKFSYFPQMEVTQPTSNPVTPKPP

SEQ ID NO: 792 - protein, 114 aa, synthetic construct
RGEAETRECIYYNANWELERTNQSGLERCYGDKDKRRHCYASWRNSSGTIELVKKGCWLDDINCYDRTDCVEKKDSPEVYFCCCEGNFCNEKFSYFPQMEVTQPTSNPVTPKPP

SEQ ID NO: 793 - protein, 115 aa, synthetic construct
GRGEAETRECIYYNANWELERTNQSGLERCYGDKDKRRHCYASWRNSSGTIELVKKGCWLDDINCYDRTDCVEKKDSPEVYFCCCEGNFCNEKFSYFPQMEVTQPTSNPVTPKPP

SEQ ID NO: 794 - protein, 116 aa, synthetic construct
SGRGEAETRECIYYNANWELERTNQSGLERCYGDKDKRRHCYASWRNSSGTIELVKKGCWLDDINCYDRTDCVEKKDSPEVYFCCCEGNFCNEKFSYFPQMEVTQPTSNPVTPKPP

SEQ ID NO: 795 - protein, 111 aa, synthetic construct
AETRECIYYNANWELERTNQSGLERCYGDKDKRRHCYASWRNSSGTIELVKKGCWLDDFNCYDRQECVATEENPQVYFCCCEGNFCNEKFSYFPQMEVTQPTSNPVTPKPP

SEQ ID NO: 796 - protein, 112 aa, synthetic construct
EAETRECIYYNANWELERTNQSGLERCYGDKDKRRHCYASWRNSSGTIELVKKGCWLDDFNCYDRQECVATEENPQVYFCCCEGNFCNEKFSYFPQMEVTQPTSNPVTPKPP

SEQ ID NO: 797 - protein, 113 aa, synthetic construct
GEAETRECIYYNANWELERTNQSGLERCYGDKDKRRHCYASWRNSSGTIELVKKGCWLDDFNCYDRQECVATEENPQVYFCCCEGNFCNEKFSYFPQMEVTQPTSNPVTPKPP

SEQ ID NO: 798 - protein, 114 aa, synthetic construct
RGEAETRECIYYNANWELERTNQSGLERCYGDKDKRRHCYASWRNSSGTIELVKKGCWLDDFNCYDRQECVATEENPQVYFCCCEGNFCNEKFSYFPQMEVTQPTSNPVTPKPP

SEQ ID NO: 799 - protein, 115 aa, synthetic construct
GRGEAETRECIYYNANWELERTNQSGLERCYGDKDKRRHCYASWRNSSGTIELVKKGCWLDDFNCYDRQECVATEENPQVYFCCCEGNFCNEKFSYFPQMEVTQPTSNPVTPKPP

SEQ ID NO: 800 - protein, 116 aa, synthetic construct
SGRGEAETRECIYYNANWELERTNQSGLERCYGDKDKRRHCYASWRNSSGTIELVKKGCWLDDFNCYDRQECVATEENPQVYFCCCEGNFCNEKFSYFPQMEVTQPTSNPVTPKPP

SEQ ID NO: 801 - protein, 111 aa, synthetic construct
AETRECIYYNANWELERTNQSGLERCYGDKDKRRHCYASWRNSSGTIELVKQGCWLDDFNCYDRQECVATEENPQVYFCCCEGNFCNEKFSYFPQMEVTQPTSNPVTPKPP

SEQ ID NO: 802 - protein, 112 aa, synthetic construct
EAETRECIYYNANWELERTNQSGLERCYGDKDKRRHCYASWRNSSGTIELVKQGCWLDDFNCYDRQECVATEENPQVYFCCCEGNFCNEKFSYFPQMEVTQPTSNPVTPKPP

SEQ ID NO: 803 - protein, 113 aa, synthetic construct
GEAETRECIYYNANWELERTNQSGLERCYGDKDKRRHCYASWRNSSGTIELVKQGCWLDDFNCYDRQECVATEENPQVYFCCCEGNFCNEKFSYFPQMEVTQPTSNPVTPKPP

SEQ ID NO: 804 - protein, 114 aa, synthetic construct
RGEAETRECIYYNANWELERTNQSGLERCYGDKDKRRHCYASWRNSSGTIELVKQGCWLDDFNCYDRQECVATEENPQVYFCCCEGNFCNEKFSYFPQMEVTQPTSNPVTPKPP

SEQ ID NO: 805 - protein, 115 aa, synthetic construct
GRGEAETRECIYYNANWELERTNQSGLERCYGDKDKRRHCYASWRNSSGTIELVKQGCWLDDFNCYDRQECVATEENPQVYFCCCEGNFCNEKFSYFPQMEVTQPTSNPVTPKPP

SEQ ID NO: 806 - protein, 116 aa, synthetic construct
SGRGEAETRECIYYNANWELERTNQSGLERCYGDKDKRRHCYASWRNSSGTIELVKQGCWLDDFNCYDRQECVATEENPQVYFCCCEGNFCNEKFSYFPQMEVTQPTSNPVTPKPP

SEQ ID NO: 807 - protein, 111 aa, synthetic construct
AETRECIYYNANWELERTNQSGLERCYGDKDKRRHCYASWRNSSGTIEIVKKGCWLDDFNCYDRQECVATKENPQVYFCCCEGNFCNEKFSYFPQMEVTQPTSNPVTPKPP

SEQ ID NO: 808 - protein, 112 aa, synthetic construct
EAETRECIYYNANWELERTNQSGLERCYGDKDKRRHCYASWRNSSGTIEIVKKGCWLDDFNCYDRQECVATKENPQVYFCCCEGNFCNEKFSYFPQMEVTQPTSNPVTPKPP

SEQ ID NO: 809 - protein, 113 aa, synthetic construct
GEAETRECIYYNANWELERTNQSGLERCYGDKDKRRHCYASWRNSSGTIEIVKKGCWLDDFNCYDRQECVATKENPQVYFCCCEGNFCNEKFSYFPQMEVTQPTSNPVTPKPP

SEQ ID NO: 810 - protein, 114 aa, synthetic construct
RGEAETRECIYYNANWELERTNQSGLERCYGDKDKRRHCYASWRNSSGTIEIVKKGCWLDDFNCYDRQECVATKENPQVYFCCCEGNFCNEKFSYFPQMEVTQPTSNPVTPKPP

SEQ ID NO: 811 - protein, 115 aa, synthetic construct
GRGEAETRECIYYNANWELERTNQSGLERCYGDKDKRRHCYASWRNSSGTIEIVKKGCWLDDFNCYDRQECVATKENPQVYFCCCEGNFCNEKFSYFPQMEVTQPTSNPVTPKPP

SEQ ID NO: 812 - protein, 116 aa, synthetic construct
SGRGEAETRECIYYNANWELERTNQSGLERCYGDKDKRRHCYASWRNSSGTIEIVKKGCWLDDFNCYDRQECVATKENPQVYFCCCEGNFCNEKFSYFPQMEVTQPTSNPVTPKPP

SEQ ID NO: 813 - protein, 111 aa, synthetic construct
AETRECIYYNANWELERTNQSGLERCYGDKDKRRHCYASWRNSSGSIELVKKGCWLDDFNCYDRQECVATKENPQVYFCCCEGNFCNEKFSYFPQMEVTQPTSNPVTPKPP

SEQ ID NO: 814 - protein, 112 aa, synthetic construct
EAETRECIYYNANWELERTNQSGLERCYGDKDKRRHCYASWRNSSGSIELVKKGCWLDDFNCYDRQECVATKENPQVYFCCCEGNFCNEKFSYFPQMEVTQPTSNPVTPKPP

SEQ ID NO: 815 - protein, 113 aa, synthetic construct
GEAETRECIYYNANWELERTNQSGLERCYGDKDKRRHCYASWRNSSGSIELVKKGCWLDDFNCYDRQECVATKENPQVYFCCCEGNFCNEKFSYFPQMEVTQPTSNPVTPKPP

SEQ ID NO: 816 - protein, 114 aa, synthetic construct
RGEAETRECIYYNANWELERTNQSGLERCYGDKDKRRHCYASWRNSSGSIELVKKGCWLDDFNCYDRQECVATKENPQVYFCCCEGNFCNEKFSYFPQMEVTQPTSNPVTPKPP

SEQ ID NO: 817 - protein, 115 aa, synthetic construct
GRGEAETRECIYYNANWELERTNQSGLERCYGDKDKRRHCYASWRNSSGSIELVKKGCWLDDFNCYDRQECVATKENPQVYFCCCEGNFCNEKFSYFPQMEVTQPTSNPVTPKPP

SEQ ID NO: 818 - protein, 116 aa, synthetic construct
SGRGEAETRECIYYNANWELERTNQSGLERCYGDKDKRRHCYASWRNSSGSIELVKKGCWLDDFNCYDRQECVATKENPQVYFCCCEGNFCNEKFSYFPQMEVTQPTSNPVTPKPP

SEQ ID NO: 819 - protein, 111 aa, synthetic construct
AETRECIYYNANWELERTNQSGLERCEGEQDKRLHCYASWRNSSGSIELVKKGCWLDDFNCYDRQECVATEENPQVYFCCCEGNFCNEKFSYFPQMEVTQPTSNPVTPKPP

SEQ ID NO: 820 - protein, 112 aa, synthetic construct
EAETRECIYYNANWELERTNQSGLERCEGEQDKRLHCYASWRNSSGSIELVKKGCWLDDFNCYDRQECVATEENPQVYFCCCEGNFCNEKFSYFPQMEVTQPTSNPVTPKPP

SEQ ID NO: 821 - protein, 113 aa, synthetic construct
GEAETRECIYYNANWELERTNQSGLERCEGEQDKRLHCYASWRNSSGSIELVKKGCWLDDFNCYDRQECVATEENPQVYFCCCEGNFCNEKFSYFPQMEVTQPTSNPVTPKPP

SEQ ID NO: 822 - protein, 114 aa, synthetic construct
RGEAETRECIYYNANWELERTNQSGLERCEGEQDKRLHCYASWRNSSGSIELVKKGCWLDDFNCYDRQECVATEENPQVYFCCCEGNFCNEKFSYFPQMEVTQPTSNPVTPKPP

SEQ ID NO: 823 - protein, 115 aa, synthetic construct
GRGEAETRECIYYNANWELERTNQSGLERCEGEQDKRLHCYASWRNSSGSIELVKKGCWLDDFNCYDRQECVATEENPQVYFCCCEGNFCNEKFSYFPQMEVTQPTSNPVTPKPP

SEQ ID NO: 824 - protein, 116 aa, synthetic construct
SGRGEAETRECIYYNANWELERTNQSGLERCEGEQDKRLHCYASWRNSSGSIELVKKGCWLDDFNCYDRQECVATEENPQVYFCCCEGNFCNEKFSYFPQMEVTQPTSNPVTPKPP

SEQ ID NO: 825 - protein, 111 aa, synthetic construct
AETRECIYYNANWELERTNQSGLERCEGEQDKRLHCYASWRNSSGTIEIVKKGCWLDDFNCYDRQECVATEENPQVYFCCCEGNFCNEKFSYFPQMEVTQPTSNPVTPKPP

SEQ ID NO: 826 - protein, 112 aa, synthetic construct
EAETRECIYYNANWELERTNQSGLERCEGEQDKRLHCYASWRNSSGTIEIVKKGCWLDDFNCYDRQECVATEENPQVYFCCCEGNFCNEKFSYFPQMEVTQPTSNPVTPKPP

SEQ ID NO: 827 - protein, 113 aa, synthetic construct
GEAETRECIYYNANWELERTNQSGLERCEGEQDKRLHCYASWRNSSGTIEIVKKGCWLDDFNCYDRQECVATEENPQVYFCCCEGNFCNEKFSYFPQMEVTQPTSNPVTPKPP

SEQ ID NO: 828 - protein, 114 aa, synthetic construct
RGEAETRECIYYNANWELERTNQSGLERCEGEQDKRLHCYASWRNSSGTIEIVKKGCWLDDFNCYDRQECVATEENPQVYFCCCEGNFCNEKFSYFPQMEVTQPTSNPVTPKPP

SEQ ID NO: 829 - protein, 115 aa, synthetic construct
GRGEAETRECIYYNANWELERTNQSGLERCEGEQDKRLHCYASWRNSSGTIEIVKKGCWLDDFNCYDRQECVATEENPQVYFCCCEGNFCNEKFSYFPQMEVTQPTSNPVTPKPP

SEQ ID NO: 830 - protein, 116 aa, synthetic construct
SGRGEAETRECIYYNANWELERTNQSGLERCEGEQDKRLHCYASWRNSSGTIEIVKKGCWLDDFNCYDRQECVATEENPQVYFCCCEGNFCNEKFSYFPQMEVTQPTSNPVTPKPP

SEQ ID NO: 831 - protein, 111 aa, synthetic construct
AETRECIYYNANWELERTNQSGLERCEGEQDKRLHCYASWRNSSGTIELVKQGCWLDDFNCYDRQECVATEENPQVYFCCCEGNFCNEKFSYFPQMEVTQPTSNPVTPKPP

SEQ ID NO: 832 - protein, 112 aa, synthetic construct
EAETRECIYYNANWELERTNQSGLERCEGEQDKRLHCYASWRNSSGTIELVKQGCWLDDFNCYDRQECVATEENPQVYFCCCEGNFCNEKFSYFPQMEVTQPTSNPVTPKPP

SEQ ID NO: 833 - protein, 113 aa, synthetic construct
GEAETRECIYYNANWELERTNQSGLERCEGEQDKRLHCYASWRNSSGTIELVKQGCWLDDFNCYDRQECVATEENPQVYFCCCEGNFCNEKFSYFPQMEVTQPTSNPVTPKPP

SEQ ID NO: 834 - protein, 114 aa, synthetic construct
RGEAETRECIYYNANWELERTNQSGLERCEGEQDKRLHCYASWRNSSGTIELVKQGCWLDDFNCYDRQECVATEENPQVYFCCCEGNFCNEKFSYFPQMEVTQPTSNPVTPKPP

SEQ ID NO: 835 - protein, 115 aa, synthetic construct
GRGEAETRECIYYNANWELERTNQSGLERCEGEQDKRLHCYASWRNSSGTIELVKQGCWLDDFNCYDRQECVATEENPQVYFCCCEGNFCNEKFSYFPQMEVTQPTSNPVTPKPP

SEQ ID NO: 836 - protein, 116 aa, synthetic construct
SGRGEAETRECIYYNANWELERTNQSGLERCEGEQDKRLHCYASWRNSSGTIELVKQGCWLDDFNCYDRQECVATEENPQVYFCCCEGNFCNEKFSYFPQMEVTQPTSNPVTPKPP

SEQ ID NO: 837 - protein, 111 aa, synthetic construct
AETRECIYYNANWELERTNQSGLERCEGEQDKRLHCYASWRNSSGTIELVKKGCWLDDFNCYDRQECVETEENPQVYFCCCEGNFCNEKFSYFPQMEVTQPTSNPVTPKPP

SEQ ID NO: 838 - protein, 112 aa, synthetic construct
EAETRECIYYNANWELERTNQSGLERCEGEQDKRLHCYASWRNSSGTIELVKKGCWLDDFNCYDRQECVETEENPQVYFCCCEGNFCNEKFSYFPQMEVTQPTSNPVTPKPP

SEQ ID NO: 839 - protein, 113 aa, synthetic construct
GEAETRECIYYNANWELERTNQSGLERCEGEQDKRLHCYASWRNSSGTIELVKKGCWLDDFNCYDRQECVETEENPQVYFCCCEGNFCNEKFSYFPQMEVTQPTSNPVTPKPP

SEQ ID NO: 840 - protein, 114 aa, synthetic construct
RGEAETRECIYYNANWELERTNQSGLERCEGEQDKRLHCYASWRNSSGTIELVKKGCWLDDFNCYDRQECVETEENPQVYFCCCEGNFCNEKFSYFPQMEVTQPTSNPVTPKPP

SEQ ID NO: 841 - protein, 115 aa, synthetic construct
GRGEAETRECIYYNANWELERTNQSGLERCEGEQDKRLHCYASWRNSSGTIELVKKGCWLDDFNCYDRQECVETEENPQVYFCCCEGNFCNEKFSYFPQMEVTQPTSNPVTPKPP

SEQ ID NO: 842 - protein, 116 aa, synthetic construct
SGRGEAETRECIYYNANWELERTNQSGLERCEGEQDKRLHCYASWRNSSGTIELVKKGCWLDDFNCYDRQECVETEENPQVYFCCCEGNFCNEKFSYFPQMEVTQPTSNPVTPKPP

SEQ ID NO: 843 - protein, 111 aa, synthetic construct
AETRECIYYNANWELERTNQSGLERCEGEQDKRLHCYASWRNSSGTIELVKKGCWLDDFNCYDRQECVAKEENPQVYFCCCEGNFCNEKFSYFPQMEVTQPTSNPVTPKPP

SEQ ID NO: 844 - protein, 112 aa, synthetic construct
EAETRECIYYNANWELERTNQSGLERCEGEQDKRLHCYASWRNSSGTIELVKKGCWLDDFNCYDRQECVAKEENPQVYFCCCEGNFCNEKFSYFPQMEVTQPTSNPVTPKPP

SEQ ID NO: 845 - protein, 113 aa, synthetic construct
GEAETRECIYYNANWELERTNQSGLERCEGEQDKRLHCYASWRNSSGTIELVKKGCWLDDFNCYDRQECVAKEENPQVYFCCCEGNFCNEKFSYFPQMEVTQPTSNPVTPKPP

SEQ ID NO: 846 - protein, 114 aa, synthetic construct
RGEAETRECIYYNANWELERTNQSGLERCEGEQDKRLHCYASWRNSSGTIELVKKGCWLDDFNCYDRQECVAKEENPQVYFCCCEGNFCNEKFSYFPQMEVTQPTSNPVTPKPP

SEQ ID NO: 847 - protein, 115 aa, synthetic construct
GRGEAETRECIYYNANWELERTNQSGLERCEGEQDKRLHCYASWRNSSGTIELVKKGCWLDDFNCYDRQECVAKEENPQVYFCCCEGNFCNEKFSYFPQMEVTQPTSNPVTPKPP

SEQ ID NO: 848 - protein, 116 aa, synthetic construct
SGRGEAETRECIYYNANWELERTNQSGLERCEGEQDKRLHCYASWRNSSGTIELVKKGCWLDDFNCYDRQECVAKEENPQVYFCCCEGNFCNEKFSYFPQMEVTQPTSNPVTPKPP

SEQ ID NO: 849 - protein, 111 aa, synthetic construct
AETRECIYYNANWELERTNQSGLERCEGEQDKRLHCYASWRNSSGTIELVKKGCWLDDFNCYDRQECVATKENPQVYFCCCEGNFCNEKFSYFPQMEVTQPTSNPVTPKPP

SEQ ID NO: 850 - protein, 112 aa, synthetic construct
EAETRECIYYNANWELERTNQSGLERCEGEQDKRLHCYASWRNSSGTIELVKKGCWLDDFNCYDRQECVATKENPQVYFCCCEGNFCNEKFSYFPQMEVTQPTSNPVTPKPP

SEQ ID NO: 851 - protein, 113 aa, synthetic construct
GEAETRECIYYNANWELERTNQSGLERCEGEQDKRLHCYASWRNSSGTIELVKKGCWLDDFNCYDRQECVATKENPQVYFCCCEGNFCNEKFSYFPQMEVTQPTSNPVTPKPP

SEQ ID NO: 852 - protein, 114 aa, synthetic construct
RGEAETRECIYYNANWELERTNQSGLERCEGEQDKRLHCYASWRNSSGTIELVKKGCWLDDFNCYDRQECVATKENPQVYFCCCEGNFCNEKFSYFPQMEVTQPTSNPVTPKPP

SEQ ID NO: 853 - protein, 115 aa, synthetic construct
GRGEAETRECIYYNANWELERTNQSGLERCEGEQDKRLHCYASWRNSSGTIELVKKGCWLDDFNCYDRQECVATKENPQVYFCCCEGNFCNEKFSYFPQMEVTQPTSNPVTPKPP

SEQ ID NO: 854 - protein, 116 aa, synthetic construct
SGRGEAETRECIYYNANWELERTNQSGLERCEGEQDKRLHCYASWRNSSGTIELVKKGCWLDDFNCYDRQECVATKENPQVYFCCCEGNFCNEKFSYFPQMEVTQPTSNPVTPKPP

SEQ ID NO: 855 - protein, 111 aa, synthetic construct
AETRECIYYNANWELERTNQSGLERCEGEQDKRLHCYASWRNSSGTIELVKKGCWLDDFNCYDRQECVATEDNPQVYFCCCEGNFCNEKFSYFPQMEVTQPTSNPVTPKPP

SEQ ID NO: 856 - protein, 112 aa, synthetic construct
EAETRECIYYNANWELERTNQSGLERCEGEQDKRLHCYASWRNSSGTIELVKKGCWLDDFNCYDRQECVATEDNPQVYFCCCEGNFCNEKFSYFPQMEVTQPTSNPVTPKPP

SEQ ID NO: 857 - protein, 113 aa, synthetic construct
GEAETRECIYYNANWELERTNQSGLERCEGEQDKRLHCYASWRNSSGTIELVKKGCWLDDFNCYDRQECVATEDNPQVYFCCCEGNFCNEKFSYFPQMEVTQPTSNPVTPKPP

SEQ ID NO: 858 - protein, 114 aa, synthetic construct
RGEAETRECIYYNANWELERTNQSGLERCEGEQDKRLHCYASWRNSSGTIELVKKGCWLDDFNCYDRQECVATEDNPQVYFCCCEGNFCNEKFSYFPQMEVTQPTSNPVTPKPP

SEQ ID NO: 859 - protein, 115 aa, synthetic construct
GRGEAETRECIYYNANWELERTNQSGLERCEGEQDKRLHCYASWRNSSGTIELVKKGCWLDDFNCYDRQECVATEDNPQVYFCCCEGNFCNEKFSYFPQMEVTQPTSNPVTPKPP

SEQ ID NO: 860 - protein, 116 aa, synthetic construct
SGRGEAETRECIYYNANWELERTNQSGLERCEGEQDKRLHCYASWRNSSGTIELVKKGCWLDDFNCYDRQECVATEDNPQVYFCCCEGNFCNEKFSYFPQMEVTQPTSNPVTPKPP

SEQ ID NO: 861 - protein, 111 aa, synthetic construct
AETRECIYYNANWELERTNQSGLERCEGEQDKRLHCYASWRNSSGTIELVKKGCWLDDFNCYDRQECVATEESPQVYFCCCEGNFCNEKFSYFPQMEVTQPTSNPVTPKPP

SEQ ID NO: 862 - protein, 112 aa, synthetic construct
EAETRECIYYNANWELERTNQSGLERCEGEQDKRLHCYASWRNSSGTIELVKKGCWLDDFNCYDRQECVATEESPQVYFCCCEGNFCNEKFSYFPQMEVTQPTSNPVTPKPP

SEQ ID NO: 863 - protein, 113 aa, synthetic construct
GEAETRECIYYNANWELERTNQSGLERCEGEQDKRLHCYASWRNSSGTIELVKKGCWLDDFNCYDRQECVATEESPQVYFCCCEGNFCNEKFSYFPQMEVTQPTSNPVTPKPP

SEQ ID NO: 864 - protein, 114 aa, synthetic construct
RGEAETRECIYYNANWELERTNQSGLERCEGEQDKRLHCYASWRNSSGTIELVKKGCWLDDFNCYDRQECVATEESPQVYFCCCEGNFCNEKFSYFPQMEVTQPTSNPVTPKPP

SEQ ID NO: 865 - protein, 115 aa, synthetic construct
GRGEAETRECIYYNANWELERTNQSGLERCEGEQDKRLHCYASWRNSSGTIELVKKGCWLDDFNCYDRQECVATEESPQVYFCCCEGNFCNEKFSYFPQMEVTQPTSNPVTPKPP

SEQ ID NO: 866 - protein, 116 aa, synthetic construct
SGRGEAETRECIYYNANWELERTNQSGLERCEGEQDKRLHCYASWRNSSGTIELVKKGCWLDDFNCYDRQECVATEESPQVYFCCCEGNFCNEKFSYFPQMEVTQPTSNPVTPKPP

SEQ ID NO: 867 - protein, 111 aa, synthetic construct
AETRECIYYNANWELERTNQSGLERCEGEQDKRLHCYASWRNSSGTIELVKKGCWLDDFNCYDRQECVATEENPEVYFCCCEGNFCNEKFSYFPQMEVTQPTSNPVTPKPP

SEQ ID NO: 868 - protein, 112 aa, synthetic construct
EAETRECIYYNANWELERTNQSGLERCEGEQDKRLHCYASWRNSSGTIELVKKGCWLDDFNCYDRQECVATEENPEVYFCCCEGNFCNEKFSYFPQMEVTQPTSNPVTPKPP

SEQ ID NO: 869 - protein, 113 aa, synthetic construct
GEAETRECIYYNANWELERTNQSGLERCEGEQDKRLHCYASWRNSSGTIELVKKGCWLDDFNCYDRQECVATEENPEVYFCCCEGNFCNEKFSYFPQMEVTQPTSNPVTPKPP

SEQ ID NO: 870 - protein, 114 aa, synthetic construct
RGEAETRECIYYNANWELERTNQSGLERCEGEQDKRLHCYASWRNSSGTIELVKKGCWLDDFNCYDRQECVATEENPEVYFCCCEGNFCNEKFSYFPQMEVTQPTSNPVTPKPP

SEQ ID NO: 871 - protein, 115 aa, synthetic construct
GRGEAETRECIYYNANWELERTNQSGLERCEGEQDKRLHCYASWRNSSGTIELVKKGCWLDDFNCYDRQECVATEENPEVYFCCCEGNFCNEKFSYFPQMEVTQPTSNPVTPKPP

SEQ ID NO: 872 - protein, 116 aa, synthetic construct
SGRGEAETRECIYYNANWELERTNQSGLERCEGEQDKRLHCYASWRNSSGTIELVKKGCWLDDFNCYDRQECVATEENPEVYFCCCEGNFCNEKFSYFPQMEVTQPTSNPVTPKPP

SEQ ID NO: 873 - protein, 111 aa, synthetic construct
AETRECIYYNANWELERTNQSGLERCEGDKDKRLHCYASWRNSSGTIELVKKGCWLDDFNCYDRQECVETEENPQVYFCCCEGNFCNEKFSYFPQMEVTQPTSNPVTPKPP

SEQ ID NO: 874 - protein, 112 aa, synthetic construct
EAETRECIYYNANWELERTNQSGLERCEGDKDKRLHCYASWRNSSGTIELVKKGCWLDDFNCYDRQECVETEENPQVYFCCCEGNFCNEKFSYFPQMEVTQPTSNPVTPKPP

SEQ ID NO: 875 - protein, 113 aa, synthetic construct
GEAETRECIYYNANWELERTNQSGLERCEGDKDKRLHCYASWRNSSGTIELVKKGCWLDDFNCYDRQECVETEENPQVYFCCCEGNFCNEKFSYFPQMEVTQPTSNPVTPKPP

SEQ ID NO: 876 - protein, 114 aa, synthetic construct
RGEAETRECIYYNANWELERTNQSGLERCEGDKDKRLHCYASWRNSSGTIELVKKGCWLDDFNCYDRQECVETEENPQVYFCCCEGNFCNEKFSYFPQMEVTQPTSNPVTPKPP

SEQ ID NO: 877 - protein, 115 aa, synthetic construct
GRGEAETRECIYYNANWELERTNQSGLERCEGDKDKRLHCYASWRNSSGTIELVKKGCWLDDFNCYDRQECVETEENPQVYFCCCEGNFCNEKFSYFPQMEVTQPTSNPVTPKPP

SEQ ID NO: 878 - protein, 116 aa, synthetic construct
SGRGEAETRECIYYNANWELERTNQSGLERCEGDKDKRLHCYASWRNSSGTIELVKKGCWLDDFNCYDRQECVETEENPQVYFCCCEGNFCNEKFSYFPQMEVTQPTSNPVTPKPP

SEQ ID NO: 879 - protein, 111 aa, synthetic construct
AETRECIYYNANWELERTNQSGLERCEGEKDKRLHCYASWRNSSGTIELVKKGCWLDDFNCYDRQECVAKEENPQVYFCCCEGNFCNEKFSYFPQMEVTQPTSNPVTPKPP

SEQ ID NO: 880 - protein, 112 aa, synthetic construct
EAETRECIYYNANWELERTNQSGLERCEGEKDKRLHCYASWRNSSGTIELVKKGCWLDDFNCYDRQECVAKEENPQVYFCCCEGNFCNEKFSYFPQMEVTQPTSNPVTPKPP

SEQ ID NO: 881 - protein, 113 aa, synthetic construct
GEAETRECIYYNANWELERTNQSGLERCEGEKDKRLHCYASWRNSSGTIELVKKGCWLDDFNCYDRQECVAKEENPQVYFCCCEGNFCNEKFSYFPQMEVTQPTSNPVTPKPP

SEQ ID NO: 882 - protein, 114 aa, synthetic construct
RGEAETRECIYYNANWELERTNQSGLERCEGEKDKRLHCYASWRNSSGTIELVKKGCWLDDFNCYDRQECVAKEENPQVYFCCCEGNFCNEKFSYFPQMEVTQPTSNPVTPKPP

SEQ ID NO: 883 - protein, 115 aa, synthetic construct
GRGEAETRECIYYNANWELERTNQSGLERCEGEKDKRLHCYASWRNSSGTIELVKKGCWLDDFNCYDRQECVAKEENPQVYFCCCEGNFCNEKFSYFPQMEVTQPTSNPVTPKPP

SEQ ID NO: 884 - protein, 116 aa, synthetic construct
SGRGEAETRECIYYNANWELERTNQSGLERCEGEKDKRLHCYASWRNSSGTIELVKKGCWLDDFNCYDRQECVAKEENPQVYFCCCEGNFCNEKFSYFPQMEVTQPTSNPVTPKPP

SEQ ID NO: 885 - protein, 111 aa, synthetic construct
AETRECIYYNANWELERTNQSGLERCEGDQDKRLHCYASWRNSSGTIELVKKGCWLDDFNCYDRQECVATKENPQVYFCCCEGNFCNEKFSYFPQMEVTQPTSNPVTPKPP

SEQ ID NO: 886 - protein, 112 aa, synthetic construct
EAETRECIYYNANWELERTNQSGLERCEGDQDKRLHCYASWRNSSGTIELVKKGCWLDDFNCYDRQECVATKENPQVYFCCCEGNFCNEKFSYFPQMEVTQPTSNPVTPKPP

SEQ ID NO: 887 - protein, 113 aa, synthetic construct
GEAETRECIYYNANWELERTNQSGLERCEGDQDKRLHCYASWRNSSGTIELVKKGCWLDDFNCYDRQECVATKENPQVYFCCCEGNFCNEKFSYFPQMEVTQPTSNPVTPKPP

SEQ ID NO: 888 - protein, 114 aa, synthetic construct
RGEAETRECIYYNANWELERTNQSGLERCEGDQDKRLHCYASWRNSSGTIELVKKGCWLDDFNCYDRQECVATKENPQVYFCCCEGNFCNEKFSYFPQMEVTQPTSNPVTPKPP

SEQ ID NO: 889 - protein, 115 aa, synthetic construct
GRGEAETRECIYYNANWELERTNQSGLERCEGDQDKRLHCYASWRNSSGTIELVKKGCWLDDFNCYDRQECVATKENPQVYFCCCEGNFCNEKFSYFPQMEVTQPTSNPVTPKPP

SEQ ID NO: 890 - protein, 116 aa, synthetic construct
SGRGEAETRECIYYNANWELERTNQSGLERCEGDQDKRLHCYASWRNSSGTIELVKKGCWLDDFNCYDRQECVATKENPQVYFCCCEGNFCNEKFSYFPQMEVTQPTSNPVTPKPP

SEQ ID NO: 891 - protein, 111 aa, synthetic construct
AETRECIYYNANWELERTNQSGLERCEGDKDKRLHCYASWRNSSGTIELVKQGCWLDDFNCYDRQECVAKKENPQVYFCCCEGNFCNEKFSYFPQMEVTQPTSNPVTPKPP

SEQ ID NO: 892 - protein, 112 aa, synthetic construct
EAETRECIYYNANWELERTNQSGLERCEGDKDKRLHCYASWRNSSGTIELVKQGCWLDDFNCYDRQECVAKKENPQVYFCCCEGNFCNEKFSYFPQMEVTQPTSNPVTPKPP

SEQ ID NO: 893 - protein, 113 aa, synthetic construct
GEAETRECIYYNANWELERTNQSGLERCEGDKDKRLHCYASWRNSSGTIELVKQGCWLDDFNCYDRQECVAKKENPQVYFCCCEGNFCNEKFSYFPQMEVTQPTSNPVTPKPP

SEQ ID NO: 894 - protein, 114 aa, synthetic construct
RGEAETRECIYYNANWELERTNQSGLERCEGDKDKRLHCYASWRNSSGTIELVKQGCWLDDFNCYDRQECVAKKENPQVYFCCCEGNFCNEKFSYFPQMEVTQPTSNPVTPKPP

SEQ ID NO: 895 - protein, 115 aa, synthetic construct
GRGEAETRECIYYNANWELERTNQSGLERCEGDKDKRLHCYASWRNSSGTIELVKQGCWLDDFNCYDRQECVAKKENPQVYFCCCEGNFCNEKFSYFPQMEVTQPTSNPVTPKPP

SEQ ID NO: 896 - protein, 116 aa, synthetic construct
SGRGEAETRECIYYNANWELERTNQSGLERCEGDKDKRLHCYASWRNSSGTIELVKQGCWLDDFNCYDRQECVAKKENPQVYFCCCEGNFCNEKFSYFPQMEVTQPTSNPVTPKPP

SEQ ID NO: 897 - protein, 111 aa, synthetic construct
AETRECIYYNANWELERTNQSGLERCEGDKDKRLHCYASWRNSSGTIEIVKQGCWLDDFNCYDRQECVAEKENPQVYFCCCEGNFCNEKFSYFPQMEVTQPTSNPVTPKPP

SEQ ID NO: 898 - protein, 112 aa, synthetic construct
EAETRECIYYNANWELERTNQSGLERCEGDKDKRLHCYASWRNSSGTIEIVKQGCWLDDFNCYDRQECVAEKENPQVYFCCCEGNFCNEKFSYFPQMEVTQPTSNPVTPKPP

SEQ ID NO: 899 - protein, 113 aa, synthetic construct
GEAETRECIYYNANWELERTNQSGLERCEGDKDKRLHCYASWRNSSGTIEIVKQGCWLDDFNCYDRQECVAEKENPQVYFCCCEGNFCNEKFSYFPQMEVTQPTSNPVTPKPP

SEQ ID NO: 900 - protein, 114 aa, synthetic construct
RGEAETRECIYYNANWELERTNQSGLERCEGDKDKRLHCYASWRNSSGTIEIVKQGCWLDDFNCYDRQECVAEKENPQVYFCCCEGNFCNEKFSYFPQMEVTQPTSNPVTPKPP

SEQ ID NO: 901 - protein, 115 aa, synthetic construct
GRGEAETRECIYYNANWELERTNQSGLERCEGDKDKRLHCYASWRNSSGTIEIVKQGCWLDDFNCYDRQECVAEKENPQVYFCCCEGNFCNEKFSYFPQMEVTQPTSNPVTPKPP

SEQ ID NO: 902 - protein, 116 aa, synthetic construct
SGRGEAETRECIYYNANWELERTNQSGLERCEGDKDKRLHCYASWRNSSGTIEIVKQGCWLDDFNCYDRQECVAEKENPQVYFCCCEGNFCNEKFSYFPQMEVTQPTSNPVTPKPP

SEQ ID NO: 903 - protein, 111 aa, synthetic construct
AETRECIYYNANWELERTNQSGLERCYGDQDKRLHCYASWRNSSGSIEIVKQGCWLDDFNCYDRQECVAKKENPQVYFCCCEGNFCNEKFSYFPQMEVTQPTSNPVTPKPP

SEQ ID NO: 904 - protein, 112 aa, synthetic construct
EAETRECIYYNANWELERTNQSGLERCYGDQDKRLHCYASWRNSSGSIEIVKQGCWLDDFNCYDRQECVAKKENPQVYFCCCEGNFCNEKFSYFPQMEVTQPTSNPVTPKPP

SEQ ID NO: 905 - protein, 113 aa, synthetic construct
GEAETRECIYYNANWELERTNQSGLERCYGDQDKRLHCYASWRNSSGSIEIVKQGCWLDDFNCYDRQECVAKKENPQVYFCCCEGNFCNEKFSYFPQMEVTQPTSNPVTPKPP

SEQ ID NO: 906 - protein, 114 aa, synthetic construct
RGEAETRECIYYNANWELERTNQSGLERCYGDQDKRLHCYASWRNSSGSIEIVKQGCWLDDFNCYDRQECVAKKENPQVYFCCCEGNFCNEKFSYFPQMEVTQPTSNPVTPKPP

SEQ ID NO: 907 - protein, 115 aa, synthetic construct
GRGEAETRECIYYNANWELERTNQSGLERCYGDQDKRLHCYASWRNSSGSIEIVKQGCWLDDFNCYDRQECVAKKENPQVYFCCCEGNFCNEKFSYFPQMEVTQPTSNPVTPKPP

SEQ ID NO: 908 - protein, 116 aa, synthetic construct
SGRGEAETRECIYYNANWELERTNQSGLERCYGDQDKRLHCYASWRNSSGSIEIVKQGCWLDDFNCYDRQECVAKKENPQVYFCCCEGNFCNEKFSYFPQMEVTQPTSNPVTPKPP

SEQ ID NO: 909 - protein, 111 aa, synthetic construct
AETRECIYYNANWELERTNQSGLERCEGEKDKRRHCYASWRNSSGTIEIVKKGCWLDDFNCYDRQECVATKENPQVYFCCCEGNFCNEKFSYFPQMEVTQPTSNPVTPKPP

SEQ ID NO: 910 - protein, 112 aa, synthetic construct
EAETRECIYYNANWELERTNQSGLERCEGEKDKRRHCYASWRNSSGTIEIVKKGCWLDDFNCYDRQECVATKENPQVYFCCCEGNFCNEKFSYFPQMEVTQPTSNPVTPKPP

SEQ ID NO: 911 - protein, 113 aa, synthetic construct
GEAETRECIYYNANWELERTNQSGLERCEGEKDKRRHCYASWRNSSGTIEIVKKGCWLDDFNCYDRQECVATKENPQVYFCCCEGNFCNEKFSYFPQMEVTQPTSNPVTPKPP

SEQ ID NO: 912 - protein, 114 aa, synthetic construct
RGEAETRECIYYNANWELERTNQSGLERCEGEKDKRRHCYASWRNSSGTIEIVKKGCWLDDFNCYDRQECVATKENPQVYFCCCEGNFCNEKFSYFPQMEVTQPTSNPVTPKPP

SEQ ID NO: 913 - protein, 115 aa, synthetic construct
GRGEAETRECIYYNANWELERTNQSGLERCEGEKDKRRHCYASWRNSSGTIEIVKKGCWLDDFNCYDRQECVATKENPQVYFCCCEGNFCNEKFSYFPQMEVTQPTSNPVTPKPP

SEQ ID NO: 914 - protein, 116 aa, synthetic construct
SGRGEAETRECIYYNANWELERTNQSGLERCEGEKDKRRHCYASWRNSSGTIEIVKKGCWLDDFNCYDRQECVATKENPQVYFCCCEGNFCNEKFSYFPQMEVTQPTSNPVTPKPP

SEQ ID NO: 915 - protein, 111 aa, synthetic construct
AETRECIYYNANWELERTNQSGLERCYGDQDKRRHCYASWRNSSGTIELVKKGCWLDDFNCYDRQECVATEENPEVYFCCCEGNFCNEKFSYFPQMEVTQPTSNPVTPKPP

SEQ ID NO: 916 - protein, 112 aa, synthetic construct
EAETRECIYYNANWELERTNQSGLERCYGDQDKRRHCYASWRNSSGTIELVKKGCWLDDFNCYDRQECVATEENPEVYFCCCEGNFCNEKFSYFPQMEVTQPTSNPVTPKPP

SEQ ID NO: 917 - protein, 113 aa, synthetic construct
GEAETRECIYYNANWELERTNQSGLERCYGDQDKRRHCYASWRNSSGTIELVKKGCWLDDFNCYDRQECVATEENPEVYFCCCEGNFCNEKFSYFPQMEVTQPTSNPVTPKPP

SEQ ID NO: 918 - protein, 114 aa, synthetic construct
RGEAETRECIYYNANWELERTNQSGLERCYGDQDKRRHCYASWRNSSGTIELVKKGCWLDDFNCYDRQECVATEENPEVYFCCCEGNFCNEKFSYFPQMEVTQPTSNPVTPKPP

SEQ ID NO: 919 - protein, 115 aa, synthetic construct
GRGEAETRECIYYNANWELERTNQSGLERCYGDQDKRRHCYASWRNSSGTIELVKKGCWLDDFNCYDRQECVATEENPEVYFCCCEGNFCNEKFSYFPQMEVTQPTSNPVTPKPP

SEQ ID NO: 920 - protein, 116 aa, synthetic construct
SGRGEAETRECIYYNANWELERTNQSGLERCYGDQDKRRHCYASWRNSSGTIELVKKGCWLDDFNCYDRQECVATEENPEVYFCCCEGNFCNEKFSYFPQMEVTQPTSNPVTPKPP

SEQ ID NO: 921 - protein, 111 aa, synthetic construct
AETRECIYYNANWELERTNQSGLERCEGEQDKRRHCYASWRNSSGTIELVKKGCWLDDFNCYDRQECVATEENPQVYFCCCEGNFCNEKFSYFPQMEVTQPTSNPVTPKPP

SEQ ID NO: 922 - protein, 112 aa, synthetic construct
EAETRECIYYNANWELERTNQSGLERCEGEQDKRRHCYASWRNSSGTIELVKKGCWLDDFNCYDRQECVATEENPQVYFCCCEGNFCNEKFSYFPQMEVTQPTSNPVTPKPP

SEQ ID NO: 923 - protein, 113 aa, synthetic construct
GEAETRECIYYNANWELERTNQSGLERCEGEQDKRRHCYASWRNSSGTIELVKKGCWLDDFNCYDRQECVATEENPQVYFCCCEGNFCNEKFSYFPQMEVTQPTSNPVTPKPP

SEQ ID NO: 924 - protein, 114 aa, synthetic construct
RGEAETRECIYYNANWELERTNQSGLERCEGEQDKRRHCYASWRNSSGTIELVKKGCWLDDFNCYDRQECVATEENPQVYFCCCEGNFCNEKFSYFPQMEVTQPTSNPVTPKPP

SEQ ID NO: 925 - protein, 115 aa, synthetic construct
GRGEAETRECIYYNANWELERTNQSGLERCEGEQDKRRHCYASWRNSSGTIELVKKGCWLDDFNCYDRQECVATEENPQVYFCCCEGNFCNEKFSYFPQMEVTQPTSNPVTPKPP

SEQ ID NO: 926 - protein, 116 aa, synthetic construct
SGRGEAETRECIYYNANWELERTNQSGLERCEGEQDKRRHCYASWRNSSGTIELVKKGCWLDDFNCYDRQECVATEENPQVYFCCCEGNFCNEKFSYFPQMEVTQPTSNPVTPKPP

SEQ ID NO: 927 - protein, 111 aa, synthetic construct
AETRECIYYNANWELERTNQSGLERCYGEQDKRLHCYASWRNSSGSIEIVKKGCWLDDFNCYDRTDCVATEENPQVYFCCCEGNFCNEKFSYFPQMEVTQPTSNPVTPKPP

SEQ ID NO: 928 - protein, 112 aa, synthetic construct
EAETRECIYYNANWELERTNQSGLERCYGEQDKRLHCYASWRNSSGSIEIVKKGCWLDDFNCYDRTDCVATEENPQVYFCCCEGNFCNEKFSYFPQMEVTQPTSNPVTPKPP

SEQ ID NO: 929 - protein, 113 aa, synthetic construct
GEAETRECIYYNANWELERTNQSGLERCYGEQDKRLHCYASWRNSSGSIEIVKKGCWLDDFNCYDRTDCVATEENPQVYFCCCEGNFCNEKFSYFPQMEVTQPTSNPVTPKPP

SEQ ID NO: 930 - protein, 114 aa, synthetic construct
RGEAETRECIYYNANWELERTNQSGLERCYGEQDKRLHCYASWRNSSGSIEIVKKGCWLDDFNCYDRTDCVATEENPQVYFCCCEGNFCNEKFSYFPQMEVTQPTSNPVTPKPP

SEQ ID NO: 931 - protein, 115 aa, synthetic construct
GRGEAETRECIYYNANWELERTNQSGLERCYGEQDKRLHCYASWRNSSGSIEIVKKGCWLDDFNCYDRTDCVATEENPQVYFCCCEGNFCNEKFSYFPQMEVTQPTSNPVTPKPP

SEQ ID NO: 932 - protein, 116 aa, synthetic construct
SGRGEAETRECIYYNANWELERTNQSGLERCYGEQDKRLHCYASWRNSSGSIEIVKKGCWLDDFNCYDRTDCVATEENPQVYFCCCEGNFCNEKFSYFPQMEVTQPTSNPVTPKPP

SEQ ID NO: 933 - protein, 111 aa, synthetic construct
AETRECIYYNANWELERTNQSGLERCEGEQDKRRHCYASWRNSSGSIELVKKGCWLDDFNCYDRQECVAKEENPQVYFCCCEGNFCNEKFSYFPQMEVTQPTSNPVTPKPP

SEQ ID NO: 934 - protein, 112 aa, synthetic construct
EAETRECIYYNANWELERTNQSGLERCEGEQDKRRHCYASWRNSSGSIELVKKGCWLDDFNCYDRQECVAKEENPQVYFCCCEGNFCNEKFSYFPQMEVTQPTSNPVTPKPP

SEQ ID NO: 935 - protein, 113 aa, synthetic construct
GEAETRECIYYNANWELERTNQSGLERCEGEQDKRRHCYASWRNSSGSIELVKKGCWLDDFNCYDRQECVAKEENPQVYFCCCEGNFCNEKFSYFPQMEVTQPTSNPVTPKPP

SEQ ID NO: 936 - protein, 114 aa, synthetic construct
RGEAETRECIYYNANWELERTNQSGLERCEGEQDKRRHCYASWRNSSGSIELVKKGCWLDDFNCYDRQECVAKEENPQVYFCCCEGNFCNEKFSYFPQMEVTQPTSNPVTPKPP

SEQ ID NO: 937 - protein, 115 aa, synthetic construct
GRGEAETRECIYYNANWELERTNQSGLERCEGEQDKRRHCYASWRNSSGSIELVKKGCWLDDFNCYDRQECVAKEENPQVYFCCCEGNFCNEKFSYFPQMEVTQPTSNPVTPKPP

SEQ ID NO: 938 - protein, 116 aa, synthetic construct
SGRGEAETRECIYYNANWELERTNQSGLERCEGEQDKRRHCYASWRNSSGSIELVKKGCWLDDFNCYDRQECVAKEENPQVYFCCCEGNFCNEKFSYFPQMEVTQPTSNPVTPKPP

SEQ ID NO: 939 - protein, 111 aa, synthetic construct
AETRECIYYNANWELERTNQSGLERCEGEQDKRRHCYASWRNSSGTIEIVKKGCWLDDFNCYDRQECVAKEENPQVYFCCCEGNFCNEKFSYFPQMEVTQPTSNPVTPKPP

SEQ ID NO: 940 - protein, 112 aa, synthetic construct
EAETRECIYYNANWELERTNQSGLERCEGEQDKRRHCYASWRNSSGTIEIVKKGCWLDDFNCYDRQECVAKEENPQVYFCCCEGNFCNEKFSYFPQMEVTQPTSNPVTPKPP

SEQ ID NO: 941 - protein, 113 aa, synthetic construct
GEAETRECIYYNANWELERTNQSGLERCEGEQDKRRHCYASWRNSSGTIEIVKKGCWLDDFNCYDRQECVAKEENPQVYFCCCEGNFCNEKFSYFPQMEVTQPTSNPVTPKPP

SEQ ID NO: 942 - protein, 114 aa, synthetic construct
RGEAETRECIYYNANWELERTNQSGLERCEGEQDKRRHCYASWRNSSGTIEIVKKGCWLDDFNCYDRQECVAKEENPQVYFCCCEGNFCNEKFSYFPQMEVTQPTSNPVTPKPP

SEQ ID NO: 943 - protein, 115 aa, synthetic construct
GRGEAETRECIYYNANWELERTNQSGLERCEGEQDKRRHCYASWRNSSGTIEIVKKGCWLDDFNCYDRQECVAKEENPQVYFCCCEGNFCNEKFSYFPQMEVTQPTSNPVTPKPP

SEQ ID NO: 944 - protein, 116 aa, synthetic construct
SGRGEAETRECIYYNANWELERTNQSGLERCEGEQDKRRHCYASWRNSSGTIEIVKKGCWLDDFNCYDRQECVAKEENPQVYFCCCEGNFCNEKFSYFPQMEVTQPTSNPVTPKPP

SEQ ID NO: 945 - protein, 111 aa, synthetic construct
AETRECIYYNANWELERTNQSGLERCEGEQDKRRHCYASWRNSSGSIEIVKKGCWLDDFNCYDRQECVATKENPQVYFCCCEGNFCNEKFSYFPQMEVTQPTSNPVTPKPP

SEQ ID NO: 946 - protein, 112 aa, synthetic construct
EAETRECIYYNANWELERTNQSGLERCEGEQDKRRHCYASWRNSSGSIEIVKKGCWLDDFNCYDRQECVATKENPQVYFCCCEGNFCNEKFSYFPQMEVTQPTSNPVTPKPP

SEQ ID NO: 947 - protein, 113 aa, synthetic construct
GEAETRECIYYNANWELERTNQSGLERCEGEQDKRRHCYASWRNSSGSIEIVKKGCWLDDFNCYDRQECVATKENPQVYFCCCEGNFCNEKFSYFPQMEVTQPTSNPVTPKPP

SEQ ID NO: 948 - protein, 114 aa, synthetic construct
RGEAETRECIYYNANWELERTNQSGLERCEGEQDKRRHCYASWRNSSGSIEIVKKGCWLDDFNCYDRQECVATKENPQVYFCCCEGNFCNEKFSYFPQMEVTQPTSNPVTPKPP

SEQ ID NO: 949 - protein, 115 aa, synthetic construct
GRGEAETRECIYYNANWELERTNQSGLERCEGEQDKRRHCYASWRNSSGSIEIVKKGCWLDDFNCYDRQECVATKENPQVYFCCCEGNFCNEKFSYFPQMEVTQPTSNPVTPKPP

SEQ ID NO: 950 - protein, 116 aa, synthetic construct
SGRGEAETRECIYYNANWELERTNQSGLERCEGEQDKRRHCYASWRNSSGSIEIVKKGCWLDDFNCYDRQECVATKENPQVYFCCCEGNFCNEKFSYFPQMEVTQPTSNPVTPKPP

SEQ ID NO: 951 - protein, 111 aa, synthetic construct
AETRECIYYNANWELERTNQSGLERCEGDQDKRLHCYASWRNSSGTIEIVKKGCWLDDFNCYDRQECVATKENPQVYFCCCEGNFCNEKFSYFPQMEVTQPTSNPVTPKPP

SEQ ID NO: 952 - protein, 112 aa, synthetic construct
EAETRECIYYNANWELERTNQSGLERCEGDQDKRLHCYASWRNSSGTIEIVKKGCWLDDFNCYDRQECVATKENPQVYFCCCEGNFCNEKFSYFPQMEVTQPTSNPVTPKPP

SEQ ID NO: 953 - protein, 113 aa, synthetic construct
GEAETRECIYYNANWELERTNQSGLERCEGDQDKRLHCYASWRNSSGTIEIVKKGCWLDDFNCYDRQECVATKENPQVYFCCCEGNFCNEKFSYFPQMEVTQPTSNPVTPKPP

SEQ ID NO: 954 - protein, 114 aa, synthetic construct
RGEAETRECIYYNANWELERTNQSGLERCEGDQDKRLHCYASWRNSSGTIEIVKKGCWLDDFNCYDRQECVATKENPQVYFCCCEGNFCNEKFSYFPQMEVTQPTSNPVTPKPP

SEQ ID NO: 955 - protein, 115 aa, synthetic construct
GRGEAETRECIYYNANWELERTNQSGLERCEGDQDKRLHCYASWRNSSGTIEIVKKGCWLDDFNCYDRQECVATKENPQVYFCCCEGNFCNEKFSYFPQMEVTQPTSNPVTPKPP

SEQ ID NO: 956 - protein, 116 aa, synthetic construct
SGRGEAETRECIYYNANWELERTNQSGLERCEGDQDKRLHCYASWRNSSGTIEIVKKGCWLDDFNCYDRQECVATKENPQVYFCCCEGNFCNEKFSYFPQMEVTQPTSNPVTPKPP

SEQ ID NO: 957 - protein, 111 aa, synthetic construct
AETRECIYYNANWELERTNQSGLERCEGDQDKRLHCYASWRNSSGSIELVKKGCWLDDFNCYDRQECVATKENPQVYFCCCEGNFCNEKFSYFPQMEVTQPTSNPVTPKPP

SEQ ID NO: 958 - protein, 112 aa, synthetic construct
EAETRECIYYNANWELERTNQSGLERCEGDQDKRLHCYASWRNSSGSIELVKKGCWLDDFNCYDRQECVATKENPQVYFCCCEGNFCNEKFSYFPQMEVTQPTSNPVTPKPP

SEQ ID NO: 959 - protein, 113 aa, synthetic construct
GEAETRECIYYNANWELERTNQSGLERCEGDQDKRLHCYASWRNSSGSIELVKKGCWLDDFNCYDRQECVATKENPQVYFCCCEGNFCNEKFSYFPQMEVTQPTSNPVTPKPP

SEQ ID NO: 960 - protein, 114 aa, synthetic construct
RGEAETRECIYYNANWELERTNQSGLERCEGDQDKRLHCYASWRNSSGSIELVKKGCWLDDFNCYDRQECVATKENPQVYFCCCEGNFCNEKFSYFPQMEVTQPTSNPVTPKPP

SEQ ID NO: 961 - protein, 115 aa, synthetic construct
GRGEAETRECIYYNANWELERTNQSGLERCEGDQDKRLHCYASWRNSSGSIELVKKGCWLDDFNCYDRQECVATKENPQVYFCCCEGNFCNEKFSYFPQMEVTQPTSNPVTPKPP

SEQ ID NO: 962 - protein, 116 aa, synthetic construct
SGRGEAETRECIYYNANWELERTNQSGLERCEGDQDKRLHCYASWRNSSGSIELVKKGCWLDDFNCYDRQECVATKENPQVYFCCCEGNFCNEKFSYFPQMEVTQPTSNPVTPKPP

SEQ ID NO: 963 - protein, 111 aa, synthetic construct; identical to SEQ ID NO: 885

SEQ ID NO: 964 - protein, 112 aa, synthetic construct; identical to SEQ ID NO: 886

SEQ ID NO: 965 - protein, 113 aa, synthetic construct; identical to SEQ ID NO: 887

SEQ ID NO: 966 - protein, 114 aa, synthetic construct; identical to SEQ ID NO: 888

SEQ ID NO: 967 - protein, 115 aa, synthetic construct; identical to SEQ ID NO: 889

SEQ ID NO: 968 - protein, 116 aa, synthetic construct; identical to SEQ ID NO: 890

SEQ ID NO: 969 - protein, 111 aa, synthetic construct
AETRECIYYNANWELERTNQSGLERCEGEQDKRLHCYASWRNSSGTIEIVKKGCWLDDFNCYDRQECVATKENPQVYFCCCEGNFCNEKFSYFPQMEVTQPTSNPVTPKPP

SEQ ID NO: 970 - protein, 112 aa, synthetic construct
EAETRECIYYNANWELERTNQSGLERCEGEQDKRLHCYASWRNSSGTIEIVKKGCWLDDFNCYDRQECVATKENPQVYFCCCEGNFCNEKFSYFPQMEVTQPTSNPVTPKPP

SEQ ID NO: 971 - protein, 113 aa, synthetic construct
GEAETRECIYYNANWELERTNQSGLERCEGEQDKRLHCYASWRNSSGTIEIVKKGCWLDDFNCYDRQECVATKENPQVYFCCCEGNFCNEKFSYFPQMEVTQPTSNPVTPKPP

SEQ ID NO: 972 - protein, 114 aa, synthetic construct
RGEAETRECIYYNANWELERTNQSGLERCEGEQDKRLHCYASWRNSSGTIEIVKKGCWLDDFNCYDRQECVATKENPQVYFCCCEGNFCNEKFSYFPQMEVTQPTSNPVTPKPP

SEQ ID NO: 973 - protein, 115 aa, synthetic construct
GRGEAETRECIYYNANWELERTNQSGLERCEGEQDKRLHCYASWRNSSGTIEIVKKGCWLDDFNCYDRQECVATKENPQVYFCCCEGNFCNEKFSYFPQMEVTQPTSNPVTPKPP

SEQ ID NO: 974 - protein, 116 aa, synthetic construct
SGRGEAETRECIYYNANWELERTNQSGLERCEGEQDKRLHCYASWRNSSGTIEIVKKGCWLDDFNCYDRQECVATKENPQVYFCCCEGNFCNEKFSYFPQMEVTQPTSNPVTPKPP

SEQ ID NO: 975 - protein, 111 aa, synthetic construct; identical to SEQ ID NO: 849

SEQ ID NO: 976 - protein, 112 aa, synthetic construct; identical to SEQ ID NO: 850

SEQ ID NO: 977 - protein, 113 aa, synthetic construct; identical to SEQ ID NO: 851

SEQ ID NO: 978 - protein, 114 aa, synthetic construct; identical to SEQ ID NO: 852

SEQ ID NO: 979 - protein, 115 aa, synthetic construct; identical to SEQ ID NO: 853

SEQ ID NO: 980 - protein, 116 aa, synthetic construct; identical to SEQ ID NO: 854

SEQ ID NO: 981 - protein, 111 aa, synthetic construct
AETRECIYYNANWELERTNQSGLERCEGDQDKRLHCYASWRNSSGTIEIVKKGCWLDDFNCYDRQECVAKKENPQVYFCCCEGNFCNEKFSYFPQMEVTQPTSNPVTPKPP

SEQ ID NO: 982 - protein, 112 aa, synthetic construct
EAETRECIYYNANWELERTNQSGLERCEGDQDKRLHCYASWRNSSGTIEIVKKGCWLDDFNCYDRQECVAKKENPQVYFCCCEGNFCNEKFSYFPQMEVTQPTSNPVTPKPP

SEQ ID NO: 983 - protein, 113 aa, synthetic construct
GEAETRECIYYNANWELERTNQSGLERCEGDQDKRLHCYASWRNSSGTIEIVKKGCWLDDFNCYDRQECVAKKENPQVYFCCCEGNFCNEKFSYFPQMEVTQPTSNPVTPKPP

SEQ ID NO: 984 - protein, 114 aa, synthetic construct
RGEAETRECIYYNANWELERTNQSGLERCEGDQDKRLHCYASWRNSSGTIEIVKKGCWLDDFNCYDRQECVAKKENPQVYFCCCEGNFCNEKFSYFPQMEVTQPTSNPVTPKPP

SEQ ID NO: 985 - protein, 115 aa, synthetic construct
GRGEAETRECIYYNANWELERTNQSGLERCEGDQDKRLHCYASWRNSSGTIEIVKKGCWLDDFNCYDRQECVAKKENPQVYFCCCEGNFCNEKFSYFPQMEVTQPTSNPVTPKPP

SEQ ID NO: 986 - protein, 116 aa, synthetic construct
SGRGEAETRECIYYNANWELERTNQSGLERCEGDQDKRLHCYASWRNSSGTIEIVKKGCWLDDFNCYDRQECVAKKENPQVYFCCCEGNFCNEKFSYFPQMEVTQPTSNPVTPKPP

SEQ ID NO: 987 - protein, 111 aa, synthetic construct
AETQECLFFNANWEKDRTNQTGVEPCYGDKDKRRHCFATWKNISGSIEIVKQGCWLDDINCYDRTDCVEKKDSPEVYFCCCEGNMCNERFTHLPEAGGPEVTYEPPPTAPT

SEQ ID NO: 988 - protein, 112 aa, synthetic construct
EAETQECLFFNANWEKDRTNQTGVEPCYGDKDKRRHCFATWKNISGSIEIVKQGCWLDDINCYDRTDCVEKKDSPEVYFCCCEGNMCNERFTHLPEAGGPEVTYEPPPTAPT

SEQ ID NO: 989 - protein, 113 aa, synthetic construct
GEAETQECLFFNANWEKDRTNQTGVEPCYGDKDKRRHCFATWKNISGSIEIVKQGCWLDDINCYDRTDCVEKKDSPEVYFCCCEGNMCNERFTHLPEAGGPEVTYEPPPTAPT

SEQ ID NO: 990 - protein, 114 aa, synthetic construct
RGEAETQECLFFNANWEKDRTNQTGVEPCYGDKDKRRHCFATWKNISGSIEIVKQGCWLDDINCYDRTDCVEKKDSPEVYFCCCEGNMCNERFTHLPEAGGPEVTYEPPPTAPT

SEQ ID NO: 991 - protein, 115 aa, synthetic construct
GRGEAETQECLFFNANWEKDRTNQTGVEPCYGDKDKRRHCFATWKNISGSIEIVKQGCWLDDINCYDRTDCVEKKDSPEVYFCCCEGNMCNERFTHLPEAGGPEVTYEPPPTAPT

SEQ ID NO: 992 - protein, 116 aa, synthetic construct
SGRGEAETQECLFFNANWEKDRTNQTGVEPCYGDKDKRRHCFATWKNISGSIEIVKQGCWLDDINCYDRTDCVEKKDSPEVYFCCCEGNMCNERFTHLPEAGGPEVTYEPPPTAPT

SEQ ID NO: 993 - protein, 111 aa, synthetic construct
AETRECIYYNANWELERTNQSGLERCYGDKDKRRHCYASWRNSSGTIELVKKGCWLDDINCYDRQECVATKENPQVYFCCCEGNFCNERFTHLPEAGGPEVTYEPPPTAPT

SEQ ID NO: 994 - protein, 112 aa, synthetic construct
EAETRECIYYNANWELERTNQSGLERCYGDKDKRRHCYASWRNSSGTIELVKKGCWLDDINCYDRQECVATKENPQVYFCCCEGNFCNERFTHLPEAGGPEVTYEPPPTAPT

SEQ ID NO: 995 - protein, 113 aa, synthetic construct
GEAETRECIYYNANWELERTNQSGLERCYGDKDKRRHCYASWRNSSGTIELVKKGCWLDDINCYDRQECVATKENPQVYFCCCEGNFCNERFTHLPEAGGPEVTYEPPPTAPT

SEQ ID NO: 996 - protein, 114 aa, synthetic construct
RGEAETRECIYYNANWELERTNQSGLERCYGDKDKRRHCYASWRNSSGTIELVKKGCWLDDINCYDRQECVATKENPQVYFCCCEGNFCNERFTHLPEAGGPEVTYEPPPTAPT

SEQ ID NO: 997 - protein, 115 aa, synthetic construct
GRGEAETRECIYYNANWELERTNQSGLERCYGDKDKRRHCYASWRNSSGTIELVKKGCWLDDINCYDRQECVATKENPQVYFCCCEGNFCNERFTHLPEAGGPEVTYEPPPTAPT

SEQ ID NO: 998 - protein, 116 aa, synthetic construct
SGRGEAETRECIYYNANWELERTNQSGLERCYGDKDKRRHCYASWRNSSGTIELVKKGCWLDDINCYDRQECVATKENPQVYFCCCEGNFCNERFTHLPEAGGPEVTYEPPPTAPT

SEQ ID NO: 999 - skipped

SEQ ID NO: 1000 - protein, 111 aa, synthetic construct
AETRECIYYNANWELERTQQSGLERCYGDKDKRRHCYASWRNSSGTIELVKKGCWLDDINCYDRTDCVEKKDSPEVYFCCCEGNFCNERFTHLPEAGGPEVTYEPPPTAPT

SEQ ID NO: 1001 - protein, 112 aa, synthetic construct
EAETRECIYYNANWELERTQQSGLERCYGDKDKRRHCYASWRNSSGTIELVKKGCWLDDINCYDRTDCVEKKDSPEVYFCCCEGNFCNERFTHLPEAGGPEVTYEPPPTAPT

SEQ ID NO: 1002 - protein, 113 aa, synthetic construct
GEAETRECIYYNANWELERTQQSGLERCYGDKDKRRHCYASWRNSSGTIELVKKGCWLDDINCYDRTDCVEKKDSPEVYFCCCEGNFCNERFTHLPEAGGPEVTYEPPPTAPT

SEQ ID NO: 1003 - protein, 114 aa, synthetic construct
RGEAETRECIYYNANWELERTQQSGLERCYGDKDKRRHCYASWRNSSGTIELVKKGCWLDDINCYDRTDCVEKKDSPEVYFCCCEGNFCNERFTHLPEAGGPEVTYEPPPTAPT

SEQ ID NO: 1004 - protein, 115 aa, synthetic construct
GRGEAETRECIYYNANWELERTQQSGLERCYGDKDKRRHCYASWRNSSGTIELVKKGCWLDDINCYDRTDCVEKKDSPEVYFCCCEGNFCNERFTHLPEAGGPEVTYEPPPTAPT

SEQ ID NO: 1005 - protein, 116 aa, synthetic construct
SGRGEAETRECIYYNANWELERTQQSGLERCYGDKDKRRHCYASWRNSSGTIELVKKGCWLDDINCYDRTDCVEKKDSPEVYFCCCEGNFCNERFTHLPEAGGPEVTYEPPPTAPT

SEQ ID NO: 1006 - protein, 111 aa, synthetic construct
AETRECIYYNANWELERTQQSGLERCYGDKDKRRHCYASWRNSSGTIELVKKGCWLDDFNCYDRTDCVEKKDSPEVYFCCCEGNFCNERFTHLPEAGGPEVTYEPPPTAPT

SEQ ID NO: 1007 - protein, 112 aa, synthetic construct
EAETRECIYYNANWELERTQQSGLERCYGDKDKRRHCYASWRNSSGTIELVKKGCWLDDFNCYDRTDCVEKKDSPEVYFCCCEGNFCNERFTHLPEAGGPEVTYEPPPTAPT

SEQ ID NO: 1008 - protein, 113 aa, synthetic construct
GEAETRECIYYNANWELERTQQSGLERCYGDKDKRRHCYASWRNSSGTIELVKKGCWLDDFNCYDRTDCVEKKDSPEVYFCCCEGNFCNERFTHLPEAGGPEVTYEPPPTAPT

SEQ ID NO: 1009 - protein, 114 aa, synthetic construct
RGEAETRECIYYNANWELERTQQSGLERCYGDKDKRRHCYASWRNSSGTIELVKKGCWLDDFNCYDRTDCVEKKDSPEVYFCCCEGNFCNERFTHLPEAGGPEVTYEPPPTAPT

SEQ ID NO: 1010 - protein, 115 aa, synthetic construct
GRGEAETRECIYYNANWELERTQQSGLERCYGDKDKRRHCYASWRNSSGTIELVKKGCWLDDFNCYDRTDCVEKKDSPEVYFCCCEGNFCNERFTHLPEAGGPEVTYEPPPTAPT

SEQ ID NO: 1011 - protein, 116 aa, synthetic construct
SGRGEAETRECIYYNANWELERTQQSGLERCYGDKDKRRHCYASWRNSSGTIELVKKGCWLDDFNCYDRTDCVEKKDSPEVYFCCCEGNFCNERFTHLPEAGGPEVTYEPPPTAPT

SEQ ID NO: 1012 - protein, 111 aa, synthetic construct
AETRECIYYNANWELERTQQSGLERCEGEQDKRLHCYASWRNSSGTIELVKKGCWLDDINCYDRTDCVEKKDSPEVYFCCCEGNFCNERFTHLPEAGGPEVTYEPPPTAPT

SEQ ID NO: 1013 - protein, 112 aa, synthetic construct
EAETRECIYYNANWELERTQQSGLERCEGEQDKRLHCYASWRNSSGTIELVKKGCWLDDINCYDRTDCVEKKDSPEVYFCCCEGNFCNERFTHLPEAGGPEVTYEPPPTAPT

SEQ ID NO: 1014 - protein, 113 aa, synthetic construct
GEAETRECIYYNANWELERTQQSGLERCEGEQDKRLHCYASWRNSSGTIELVKKGCWLDDINCYDRTDCVEKKDSPEVYFCCCEGNFCNERFTHLPEAGGPEVTYEPPPTAPT

SEQ ID NO: 1015 - protein, 114 aa, synthetic construct
RGEAETRECIYYNANWELERTQQSGLERCEGEQDKRLHCYASWRNSSGTIELVKKGCWLDDINCYDRTDCVEKKDSPEVYFCCCEGNFCNERFTHLPEAGGPEVTYEPPPTAPT

SEQ ID NO: 1016 - protein, 115 aa, synthetic construct
GRGEAETRECIYYNANWELERTQQSGLERCEGEQDKRLHCYASWRNSSGTIELVKKGCWLDDINCYDRTDCVEKKDSPEVYFCCCEGNFCNERFTHLPEAGGPEVTYEPPPTAPT

SEQ ID NO: 1017 - protein, 116 aa, synthetic construct
SGRGEAETRECIYYNANWELERTQQSGLERCEGEQDKRLHCYASWRNSSGTIELVKKGCWLDDINCYDRTDCVEKKDSPEVYFCCCEGNFCNERFTHLPEAGGPEVTYEPPPTAPT

SEQ ID NO: 1018 - protein, 111 aa, synthetic construct
AETRECIYYNANWELERTQQSGLERCEGEQDKRLHCYASWRNSSGTIELVKKGCWLDDINCYDRTDCVEKKDSPQVYFCCCEGNFCNERFTHLPEAGGPEVTYEPPPTAPT

SEQ ID NO: 1019 - protein, 112 aa, synthetic construct
EAETRECIYYNANWELERTQQSGLERCEGEQDKRLHCYASWRNSSGTIELVKKGCWLDDINCYDRTDCVEKKDSPQVYFCCCEGNFCNERFTHLPEAGGPEVTYEPPPTAPT

SEQ ID NO: 1020 - protein, 113 aa, synthetic construct
GEAETRECIYYNANWELERTQQSGLERCEGEQDKRLHCYASWRNSSGTIELVKKGCWLDDINCYDRTDCVEKKDSPQVYFCCCEGNFCNERFTHLPEAGGPEVTYEPPPTAPT

SEQ ID NO: 1021 - protein, 114 aa, synthetic construct
RGEAETRECIYYNANWELERTQQSGLERCEGEQDKRLHCYASWRNSSGTIELVKKGCWLDDINCYDRTDCVEKKDSPQVYFCCCEGNFCNERFTHLPEAGGPEVTYEPPPTAPT

SEQ ID NO: 1022 - protein, 115 aa, synthetic construct
GRGEAETRECIYYNANWELERTQQSGLERCEGEQDKRLHCYASWRNSSGTIELVKKGCWLDDINCYDRTDCVEKKDSPQVYFCCCEGNFCNERFTHLPEAGGPEVTYEPPPTAPT

SEQ ID NO: 1023 - protein, 116 aa, synthetic construct
SGRGEAETRECIYYNANWELERTQQSGLERCEGEQDKRLHCYASWRNSSGTIELVKKGCWLDDINCYDRTDCVEKKDSPQVYFCCCEGNFCNERFTHLPEAGGPEVTYEPPPTAPT

SEQ ID NO: 1024 - protein, 111 aa, synthetic construct
AETRECIYYNANWELERTQQSGLERCEGEQDKRLHCYASWRNSSGTIELVKKGCWLDDFNCYDRTDCVEKKDSPQVYFCCCEGNFCNERFTHLPEAGGPEVTYEPPPTAPT

SEQ ID NO: 1025 - protein, 112 aa, synthetic construct
EAETRECIYYNANWELERTQQSGLERCEGEQDKRLHCYASWRNSSGTIELVKKGCWLDDFNCYDRTDCVEKKDSPQVYFCCCEGNFCNERFTHLPEAGGPEVTYEPPPTAPT

SEQ ID NO: 1026 - protein, 113 aa, synthetic construct
GEAETRECIYYNANWELERTQQSGLERCEGEQDKRLHCYASWRNSSGTIELVKKGCWLDDFNCYDRTDCVEKKDSPQVYFCCCEGNFCNERFTHLPEAGGPEVTYEPPPTAPT

SEQ ID NO: 1027 - protein, 114 aa, synthetic construct
RGEAETRECIYYNANWELERTQQSGLERCEGEQDKRLHCYASWRNSSGTIELVKKGCWLDDFNCYDRTDCVEKKDSPQVYFCCCEGNFCNERFTHLPEAGGPEVTYEPPPTAPT

SEQ ID NO: 1028 - protein, 115 aa, synthetic construct
GRGEAETRECIYYNANWELERTQQSGLERCEGEQDKRLHCYASWRNSSGTIELVKKGCWLDDFNCYDRTDCVEKKDSPQVYFCCCEGNFCNERFTHLPEAGGPEVTYEPPPTAPT

SEQ ID NO: 1029 - protein, 116 aa, synthetic construct
SGRGEAETRECIYYNANWELERTQQSGLERCEGEQDKRLHCYASWRNSSGTIELVKKGCWLDDFNCYDRTDCVEKKDSPQVYFCCCEGNFCNERFTHLPEAGGPEVTYEPPPTAPT

SEQ ID NO: 1030 - protein, 111 aa, synthetic construct
AETRECIYYNANWELERTQQSGLERCEGEQDKRLHCYASWRNSSGTIELVKKGCWLDDFNCYDRTDCVEKKDSPEVYFCCCEGNFCNERFTHLPEAGGPEVTYEPPPTAPT

SEQ ID NO: 1031 - protein, 112 aa, synthetic construct
EAETRECIYYNANWELERTQQSGLERCEGEQDKRLHCYASWRNSSGTIELVKKGCWLDDFNCYDRTDCVEKKDSPEVYFCCCEGNFCNERFTHLPEAGGPEVTYEPPPTAPT

SEQ ID NO: 1032 - protein, 113 aa, synthetic construct
GEAETRECIYYNANWELERTQQSGLERCEGEQDKRLHCYASWRNSSGTIELVKKGCWLDDFNCYDRTDCVEKKDSPEVYFCCCEGNFCNERFTHLPEAGGPEVTYEPPPTAPT

SEQ ID NO: 1033 - protein, 114 aa, synthetic construct
RGEAETRECIYYNANWELERTQQSGLERCEGEQDKRLHCYASWRNSSGTIELVKKGCWLDDFNCYDRTDCVEKKDSPEVYFCCCEGNFCNERFTHLPEAGGPEVTYEPPPTAPT

SEQ ID NO: 1034 - protein, 115 aa, synthetic construct
GRGEAETRECIYYNANWELERTQQSGLERCEGEQDKRLHCYASWRNSSGTIELVKKGCWLDDFNCYDRTDCVEKKDSPEVYFCCCEGNFCNERFTHLPEAGGPEVTYEPPPTAPT

SEQ ID NO: 1035 - protein, 116 aa, synthetic construct
SGRGEAETRECIYYNANWELERTQQSGLERCEGEQDKRLHCYASWRNSSGTIELVKKGCWLDDFNCYDRTDCVEKKDSPEVYFCCCEGNFCNERFTHLPEAGGPEVTYEPPPTAPT

SEQ ID NO: 1036 - protein, 111 aa, synthetic construct
AETRECIYYNANWELERTQQSGLERCEGEQDKRLHCYASWRNSSGTIELVKKGCWLDDFNCYDRQECVEKKDSPEVYFCCCEGNFCNERFTHLPEAGGPEVTYEPPPTAPT

SEQ ID NO: 1037 - protein, 112 aa, synthetic construct
EAETRECIYYNANWELERTQQSGLERCEGEQDKRLHCYASWRNSSGTIELVKKGCWLDDFNCYDRQECVEKKDSPEVYFCCCEGNFCNERFTHLPEAGGPEVTYEPPPTAPT

SEQ ID NO: 1038 - protein, 113 aa, synthetic construct
GEAETRECIYYNANWELERTQQSGLERCEGEQDKRLHCYASWRNSSGTIELVKKGCWLDDFNCYDRQECVEKKDSPEVYFCCCEGNFCNERFTHLPEAGGPEVTYEPPPTAPT

SEQ ID NO: 1039 - protein, 114 aa, synthetic construct
RGEAETRECIYYNANWELERTQQSGLERCEGEQDKRLHCYASWRNSSGTIELVKKGCWLDDFNCYDRQECVEKKDSPEVYFCCCEGNFCNERFTHLPEAGGPEVTYEPPPTAPT

SEQ ID NO: 1040 - protein, 115 aa, synthetic construct
GRGEAETRECIYYNANWELERTQQSGLERCEGEQDKRLHCYASWRNSSGTIELVKKGCWLDDFNCYDRQECVEKKDSPEVYFCCCEGNFCNERFTHLPEAGGPEVTYEPPPTAPT

SEQ ID NO: 1041 - protein, 116 aa, synthetic construct
SGRGEAETRECIYYNANWELERTQQSGLERCEGEQDKRLHCYASWRNSSGTIELVKKGCWLDDFNCYDRQECVEKKDSPEVYFCCCEGNFCNERFTHLPEAGGPEVTYEPPPTAPT

SEQ ID NO: 1042 - protein, 111 aa, synthetic construct
AETRECIYYNANWELERTQQSGLERCEGEQDKRLHCYASWRNSSGTIELVKKGCWLDDFNCYDRQECVEKKDSPQVYFCCCEGNFCNERFTHLPEAGGPEVTYEPPPTAPT

SEQ ID NO: 1043 - protein, 112 aa, synthetic construct
EAETRECIYYNANWELERTQQSGLERCEGEQDKRLHCYASWRNSSGTIELVKKGCWLDDFNCYDRQECVEKKDSPQVYFCCCEGNFCNERFTHLPEAGGPEVTYEPPPTAPT

SEQ ID NO: 1044 - protein, 113 aa, synthetic construct
GEAETRECIYYNANWELERTQQSGLERCEGEQDKRLHCYASWRNSSGTIELVKKGCWLDDFNCYDRQECVEKKDSPQVYFCCCEGNFCNERFTHLPEAGGPEVTYEPPPTAPT

SEQ ID NO: 1045 - protein, 114 aa, synthetic construct
RGEAETRECIYYNANWELERTQQSGLERCEGEQDKRLHCYASWRNSSGTIELVKKGCWLDDFNCYDRQECVEKKDSPQVYFCCCEGNFCNERFTHLPEAGGPEVTYEPPPTAPT

SEQ ID NO: 1046 - protein, 115 aa, synthetic construct
GRGEAETRECIYYNANWELERTQQSGLERCEGEQDKRLHCYASWRNSSGTIELVKKGCWLDDFNCYDRQECVEKKDSPQVYFCCCEGNFCNERFTHLPEAGGPEVTYEPPPTAPT

SEQ ID NO: 1047 - protein, 116 aa, synthetic construct
SGRGEAETRECIYYNANWELERTQQSGLERCEGEQDKRLHCYASWRNSSGTIELVKKGCWLDDFNCYDRQECVEKKDSPQVYFCCCEGNFCNERFTHLPEAGGPEVTYEPPPTAPT

SEQ ID NO: 1048 - protein, 110 aa, synthetic construct
ATRECIYYNANWELERTQQSGLERCEGEQDKRLHCYASWRNSSGTIELVKKGCWLDDINCYDRQECVEKKDSPEVYFCCCEGNFCNERFTHLPEAGGPEVTYEPPPTAPT

SEQ ID NO: 1049 - protein, 111 aa, synthetic construct
EATRECIYYNANWELERTQQSGLERCEGEQDKRLHCYASWRNSSGTIELVKKGCWLDDINCYDRQECVEKKDSPEVYFCCCEGNFCNERFTHLPEAGGPEVTYEPPPTAPT

SEQ ID NO: 1050 - protein, 112 aa, synthetic construct
GEATRECIYYNANWELERTQQSGLERCEGEQDKRLHCYASWRNSSGTIELVKKGCWLDDINCYDRQECVEKKDSPEVYFCCCEGNFCNERFTHLPEAGGPEVTYEPPPTAPT

SEQ ID NO: 1051 - protein, 113 aa, synthetic construct
RGEATRECIYYNANWELERTQQSGLERCEGEQDKRLHCYASWRNSSGTIELVKKGCWLDDINCYDRQECVEKKDSPEVYFCCCEGNFCNERFTHLPEAGGPEVTYEPPPTAPT

SEQ ID NO: 1052 - protein, 114 aa, synthetic construct
GRGEATRECIYYNANWELERTQQSGLERCEGEQDKRLHCYASWRNSSGTIELVKKGCWLDDINCYDRQECVEKKDSPEVYFCCCEGNFCNERFTHLPEAGGPEVTYEPPPTAPT

SEQ ID NO: 1053 - protein, 115 aa, synthetic construct
SGRGEATRECIYYNANWELERTQQSGLERCEGEQDKRLHCYASWRNSSGTIELVKKGCWLDDINCYDRQECVEKKDSPEVYFCCCEGNFCNERFTHLPEAGGPEVTYEPPPTAPT

SEQ ID NO: 1054 - protein, 111 aa, synthetic construct
AETRECIYYNANWELERTQQSGLERCEGEQDKRLHCYASWRNSSGTIELVKKGCWLDDFNCYDRTDCVEKKDSPEVYFCCCEGNMCNERFTHLPEAGGPEVTYEPPPTAPT

SEQ ID NO: 1055 - protein, 112 aa, synthetic construct
EAETRECIYYNANWELERTQQSGLERCEGEQDKRLHCYASWRNSSGTIELVKKGCWLDDFNCYDRTDCVEKKDSPEVYFCCCEGNMCNERFTHLPEAGGPEVTYEPPPTAPT

SEQ ID NO: 1056 - protein, 113 aa, synthetic construct
GEAETRECIYYNANWELERTQQSGLERCEGEQDKRLHCYASWRNSSGTIELVKKGCWLDDFNCYDRTDCVEKKDSPEVYFCCCEGNMCNERFTHLPEAGGPEVTYEPPPTAPT

SEQ ID NO: 1057 - protein, 114 aa, synthetic construct
RGEAETRECIYYNANWELERTQQSGLERCEGEQDKRLHCYASWRNSSGTIELVKKGCWLDDFNCYDRTDCVEKKDSPEVYFCCCEGNMCNERFTHLPEAGGPEVTYEPPPTAPT

SEQ ID NO: 1058 - protein, 115 aa, synthetic construct
GRGEAETRECIYYNANWELERTQQSGLERCEGEQDKRLHCYASWRNSSGTIELVKKGCWLDDFNCYDRTDCVEKKDSPEVYFCCCEGNMCNERFTHLPEAGGPEVTYEPPPTAPT

SEQ ID NO: 1059 - protein, 116 aa, synthetic construct
SGRGEAETRECIYYNANWELERTQQSGLERCEGEQDKRLHCYASWRNSSGTIELVKKGCWLDDFNCYDRTDCVEKKDSPEVYFCCCEGNMCNERFTHLPEAGGPEVTYEPPPTAPT

SEQ ID NO: 1060 - protein, 111 aa, synthetic construct
AETRECIYYNANWELERTQQSGLERCEGDQDKRLHCYASWRNSSGTIELVKKGCWLDDFNCYDRQECVEKKDSPEVYFCCCEGNMCNERFTHLPEAGGPEVTYEPPPTAPT

SEQ ID NO: 1061 - protein, 112 aa, synthetic construct
EAETRECIYYNANWELERTQQSGLERCEGDQDKRLHCYASWRNSSGTIELVKKGCWLDDFNCYDRQECVEKKDSPEVYFCCCEGNMCNERFTHLPEAGGPEVTYEPPPTAPT

SEQ ID NO: 1062 - protein, 113 aa, synthetic construct
GEAETRECIYYNANWELERTQQSGLERCEGDQDKRLHCYASWRNSSGTIELVKKGCWLDDFNCYDRQECVEKKDSPEVYFCCCEGNMCNERFTHLPEAGGPEVTYEPPPTAPT

SEQ ID NO: 1063 - protein, 114 aa, synthetic construct
RGEAETRECIYYNANWELERTQQSGLERCEGDQDKRLHCYASWRNSSGTIELVKKGCWLDDFNCYDRQECVEKKDSPEVYFCCCEGNMCNERFTHLPEAGGPEVTYEPPPTAPT

SEQ ID NO: 1064 - protein, 115 aa, synthetic construct
GRGEAETRECIYYNANWELERTQQSGLERCEGDQDKRLHCYASWRNSSGTIELVKKGCWLDDFNCYDRQECVEKKDSPEVYFCCCEGNMCNERFTHLPEAGGPEVTYEPPPTAPT

SEQ ID NO: 1065 - protein, 116 aa, synthetic construct
SGRGEAETRECIYYNANWELERTQQSGLERCEGDQDKRLHCYASWRNSSGTIELVKKGCWLDDFNCYDRQECVEKKDSPEVYFCCCEGNMCNERFTHLPEAGGPEVTYEPPPTAPT

SEQ ID NO: 1066 - protein, 111 aa, synthetic construct
AETQECIYYNANWEKDRTQQTGVEPCYGDKDKRRHCYASWRNSSGTIELVKKGCWLDDFNCYDRQECVATEENPQVYFCCCEGNFCNERFTHLPEAGGPEVTYEPPPTAPT

SEQ ID NO: 1067 - protein, 112 aa, synthetic construct
EAETQECIYYNANWEKDRTQQTGVEPCYGDKDKRRHCYASWRNSSGTIELVKKGCWLDDFNCYDRQECVATEENPQVYFCCCEGNFCNERFTHLPEAGGPEVTYEPPPTAPT

SEQ ID NO: 1068 - protein, 113 aa, synthetic construct
GEAETQECIYYNANWEKDRTQQTGVEPCYGDKDKRRHCYASWRNSSGTIELVKKGCWLDDFNCYDRQECVATEENPQVYFCCCEGNFCNERFTHLPEAGGPEVTYEPPPTAPT

SEQ ID NO: 1069 - protein, 114 aa, synthetic construct
RGEAETQECIYYNANWEKDRTQQTGVEPCYGDKDKRRHCYASWRNSSGTIELVKKGCWLDDFNCYDRQECVATEENPQVYFCCCEGNFCNERFTHLPEAGGPEVTYEPPPTAPT

SEQ ID NO: 1070 - protein, 115 aa, synthetic construct
GRGEAETQECIYYNANWEKDRTQQTGVEPCYGDKDKRRHCYASWRNSSGTIELVKKGCWLDDFNCYDRQECVATEENPQVYFCCCEGNFCNERFTHLPEAGGPEVTYEPPPTAPT

SEQ ID NO: 1071 - protein, 116 aa, synthetic construct
SGRGEAETQECIYYNANWEKDRTQQTGVEPCYGDKDKRRHCYASWRNSSGTIELVKKGCWLDDFNCYDRQECVATEENPQVYFCCCEGNFCNERFTHLPEAGGPEVTYEPPPTAPT

SEQ ID NO: 1072 - protein, 111 aa, synthetic construct
AETQECIYYNANWEKDRTQQTGVEPCEGDQDKRLHCYASWRNSSGTIELVKKGCWLDDFNCYDRQECVATEENPQVYFCCCEGNFCNERFTHLPEAGGPEVTYEPPPTAPT

SEQ ID NO: 1073 - protein, 112 aa, synthetic construct
EAETQECIYYNANWEKDRTQQTGVEPCEGDQDKRLHCYASWRNSSGTIELVKKGCWLDDFNCYDRQECVATEENPQVYFCCCEGNFCNERFTHLPEAGGPEVTYEPPPTAPT

SEQ ID NO: 1074 - protein, 113 aa, synthetic construct
GEAETQECIYYNANWEKDRTQQTGVEPCEGDQDKRLHCYASWRNSSGTIELVKKGCWLDDFNCYDRQECVATEENPQVYFCCCEGNFCNERFTHLPEAGGPEVTYEPPPTAPT

SEQ ID NO: 1075 - protein, 114 aa, synthetic construct
RGEAETQECIYYNANWEKDRTQQTGVEPCEGDQDKRLHCYASWRNSSGTIELVKKGCWLDDFNCYDRQECVATEENPQVYFCCCEGNFCNERFTHLPEAGGPEVTYEPPPTAPT

SEQ ID NO: 1076 - protein, 115 aa, synthetic construct
GRGEAETQECIYYNANWEKDRTQQTGVEPCEGDQDKRLHCYASWRNSSGTIELVKKGCWLDDFNCYDRQECVATEENPQVYFCCCEGNFCNERFTHLPEAGGPEVTYEPPPTAPT

SEQ ID NO: 1077 - protein, 116 aa, synthetic construct
SGRGEAETQECIYYNANWEKDRTQQTGVEPCEGDQDKRLHCYASWRNSSGTIELVKKGCWLDDFNCYDRQECVATEENPQVYFCCCEGNFCNERFTHLPEAGGPEVTYEPPPTAPT

SEQ ID NO: 1078 - protein, 111 aa, synthetic construct
AETRECIYYNANWELERTQQSGLERCYGDKDKRRHCYASWRNSSGTIELVKKGCWLDDFNCYDRQECVATEENPQVYFCCCEGNFCNERFTHLPEAGGPEVTYEPPPTAPT

SEQ ID NO: 1079 - protein, 112 aa, synthetic construct
EAETRECIYYNANWELERTQQSGLERCYGDKDKRRHCYASWRNSSGTIELVKKGCWLDDFNCYDRQECVATEENPQVYFCCCEGNFCNERFTHLPEAGGPEVTYEPPPTAPT

SEQ ID NO: 1080 - protein, 113 aa, synthetic construct
GEAETRECIYYNANWELERTQQSGLERCYGDKDKRRHCYASWRNSSGTIELVKKGCWLDDFNCYDRQECVATEENPQVYFCCCEGNFCNERFTHLPEAGGPEVTYEPPPTAPT

SEQ ID NO: 1081 - protein, 114 aa, synthetic construct
RGEAETRECIYYNANWELERTQQSGLERCYGDKDKRRHCYASWRNSSGTIELVKKGCWLDDFNCYDRQECVATEENPQVYFCCCEGNFCNERFTHLPEAGGPEVTYEPPPTAPT

SEQ ID NO: 1082 - protein, 115 aa, synthetic construct
GRGEAETRECIYYNANWELERTQQSGLERCYGDKDKRRHCYASWRNSSGTIELVKKGCWLDDFNCYDRQECVATEENPQVYFCCCEGNFCNERFTHLPEAGGPEVTYEPPPTAPT

SEQ ID NO: 1083 - protein, 116 aa, synthetic construct
SGRGEAETRECIYYNANWELERTQQSGLERCYGDKDKRRHCYASWRNSSGTIELVKKGCWLDDFNCYDRQECVATEENPQVYFCCCEGNFCNERFTHLPEAGGPEVTYEPPPTAPT

SEQ ID NO: 1084 - protein, 111 aa, synthetic construct
AETRECIYYNANWEKDRTQQTGVEPCEGDQDKRLHCYASWRNSSGTIELVKKGCWLDDFNCYDRQECVATEENPQVYFCCCEGNFCNERFTHLPEAGGPEVTYEPPPTAPT

SEQ ID NO: 1085 - protein, 112 aa, synthetic construct
EAETRECIYYNANWEKDRTQQTGVEPCEGDQDKRLHCYASWRNSSGTIELVKKGCWLDDFNCYDRQECVATEENPQVYFCCCEGNFCNERFTHLPEAGGPEVTYEPPPTAPT

SEQ ID NO: 1086 - protein, 113 aa, synthetic construct
GEAETRECIYYNANWEKDRTQQTGVEPCEGDQDKRLHCYASWRNSSGTIELVKKGCWLDDFNCYDRQECVATEENPQVYFCCCEGNFCNERFTHLPEAGGPEVTYEPPPTAPT

SEQ ID NO: 1087 - protein, 114 aa, synthetic construct
RGEAETRECIYYNANWEKDRTQQTGVEPCEGDQDKRLHCYASWRNSSGTIELVKKGCWLDDFNCYDRQECVATEENPQVYFCCCEGNFCNERFTHLPEAGGPEVTYEPPPTAPT

SEQ ID NO: 1088 - protein, 115 aa, synthetic construct
GRGEAETRECIYYNANWEKDRTQQTGVEPCEGDQDKRLHCYASWRNSSGTIELVKKGCWLDDFNCYDRQECVATEENPQVYFCCCEGNFCNERFTHLPEAGGPEVTYEPPPTAPT

SEQ ID NO: 1089 - protein, 116 aa, synthetic construct
SGRGEAETRECIYYNANWEKDRTQQTGVEPCEGDQDKRLHCYASWRNSSGTIELVKKGCWLDDFNCYDRQECVATEENPQVYFCCCEGNFCNERFTHLPEAGGPEVTYEPPPTAPT

SEQ ID NO: 1090 - protein, 111 aa, synthetic construct; identical to SEQ ID NO: 1072

SEQ ID NO: 1091 - protein, 112 aa, synthetic construct; identical to SEQ ID NO: 1073

SEQ ID NO: 1092 - protein, 113 aa, synthetic construct; identical to SEQ ID NO: 1074

SEQ ID NO: 1093 - protein, 114 aa, synthetic construct; identical to SEQ ID NO: 1075

SEQ ID NO: 1094 - protein, 115 aa, synthetic construct; identical to SEQ ID NO: 1076

SEQ ID NO: 1095 - protein, 116 aa, synthetic construct; identical to SEQ ID NO: 1077

SEQ ID NO: 1096 - protein, 111 aa, synthetic construct
AETQECIYYNANWEKDRTQQTGLERCEGEQDKRLHCYASWRNSSGTIELVKKGCWLDDFNCYDRQECVATEENPQVYFCCCEGNFCNERFTHLPEAGGPEVTYEPPPTAPT

SEQ ID NO: 1097 - protein, 112 aa, synthetic construct
EAETQECIYYNANWEKDRTQQTGLERCEGEQDKRLHCYASWRNSSGTIELVKKGCWLDDFNCYDRQECVATEENPQVYFCCCEGNFCNERFTHLPEAGGPEVTYEPPPTAPT

SEQ ID NO: 1098 - protein, 113 aa, synthetic construct
GEAETQECIYYNANWEKDRTQQTGLERCEGEQDKRLHCYASWRNSSGTIELVKKGCWLDDFNCYDRQECVATEENPQVYFCCCEGNFCNERFTHLPEAGGPEVTYEPPPTAPT

SEQ ID NO: 1099 - protein, 114 aa, synthetic construct
RGEAETQECIYYNANWEKDRTQQTGLERCEGEQDKRLHCYASWRNSSGTIELVKKGCWLDDFNCYDRQECVATEENPQVYFCCCEGNFCNERFTHLPEAGGPEVTYEPPPTAPT

SEQ ID NO: 1100 - protein, 115 aa, synthetic construct
GRGEAETQECIYYNANWEKDRTQQTGLERCEGEQDKRLHCYASWRNSSGTIELVKKGCWLDDFNCYDRQECVATEENPQVYFCCCEGNFCNERFTHLPEAGGPEVTYEPPPTAPT

SEQ ID NO: 1101 - protein, 116 aa, synthetic construct
SGRGEAETQECIYYNANWEKDRTQQTGLERCEGEQDKRLHCYASWRNSSGTIELVKKGCWLDDFNCYDRQECVATEENPQVYFCCCEGNFCNERFTHLPEAGGPEVTYEPPPTAPT

SEQ ID NO: 1102 - protein, 111 aa, synthetic construct
AETQECIYYNANWEKDRTQQSGLERCEGEQDKRLHCYASWRNSSGTIELVKKGCWLDDFNCYDRQECVATEENPQVYFCCCEGNFCNERFTHLPEAGGPEVTYEPPPTAPT

SEQ ID NO: 1103 - protein, 112 aa, synthetic construct
EAETQECIYYNANWEKDRTQQSGLERCEGEQDKRLHCYASWRNSSGTIELVKKGCWLDDFNCYDRQECVATEENPQVYFCCCEGNFCNERFTHLPEAGGPEVTYEPPPTAPT

SEQ ID NO: 1104 - protein, 113 aa, synthetic construct
GEAETQECIYYNANWEKDRTQQSGLERCEGEQDKRLHCYASWRNSSGTIELVKKGCWLDDFNCYDRQECVATEENPQVYFCCCEGNFCNERFTHLPEAGGPEVTYEPPPTAPT

SEQ ID NO: 1105 - protein, 114 aa, synthetic construct
RGEAETQECIYYNANWEKDRTQQSGLERCEGEQDKRLHCYASWRNSSGTIELVKKGCWLDDFNCYDRQECVATEENPQVYFCCCEGNFCNERFTHLPEAGGPEVTYEPPPTAPT

SEQ ID NO: 1106 - protein, 115 aa, synthetic construct
GRGEAETQECIYYNANWEKDRTQQSGLERCEGEQDKRLHCYASWRNSSGTIELVKKGCWLDDFNCYDRQECVATEENPQVYFCCCEGNFCNERFTHLPEAGGPEVTYEPPPTAPT

SEQ ID NO: 1107 - protein, 116 aa, synthetic construct
SGRGEAETQECIYYNANWEKDRTQQSGLERCEGEQDKRLHCYASWRNSSGTIELVKKGCWLDDFNCYDRQECVATEENPQVYFCCCEGNFCNERFTHLPEAGGPEVTYEPPPTAPT

SEQ ID NO: 1108 - protein, 111 aa, synthetic construct
AETRECIYYNANWEKDRTQQSGLERCEGEQDKRLHCYASWRNSSGTIELVKKGCWLDDFNCYDRQECVATEENPQVYFCCCEGNFCNERFTHLPEAGGPEVTYEPPPTAPT

SEQ ID NO: 1109 - protein, 112 aa, synthetic construct
EAETRECIYYNANWEKDRTQQSGLERCEGEQDKRLHCYASWRNSSGTIELVKKGCWLDDFNCYDRQECVATEENPQVYFCCCEGNFCNERFTHLPEAGGPEVTYEPPPTAPT

SEQ ID NO: 1110 - protein, 113 aa, synthetic construct
GEAETRECIYYNANWEKDRTQQSGLERCEGEQDKRLHCYASWRNSSGTIELVKKGCWLDDFNCYDRQECVATEENPQVYFCCCEGNFCNERFTHLPEAGGPEVTYEPPPTAPT

SEQ ID NO: 1111 - protein, 114 aa, synthetic construct
RGEAETRECIYYNANWEKDRTQQSGLERCEGEQDKRLHCYASWRNSSGTIELVKKGCWLDDFNCYDRQECVATEENPQVYFCCCEGNFCNERFTHLPEAGGPEVTYEPPPTAPT

SEQ ID NO: 1112 - protein, 115 aa, synthetic construct
GRGEAETRECIYYNANWEKDRTQQSGLERCEGEQDKRLHCYASWRNSSGTIELVKKGCWLDDFNCYDRQECVATEENPQVYFCCCEGNFCNERFTHLPEAGGPEVTYEPPPTAPT

SEQ ID NO: 1113 - protein, 116 aa, synthetic construct
SGRGEAETRECIYYNANWEKDRTQQSGLERCEGEQDKRLHCYASWRNSSGTIELVKKGCWLDDFNCYDRQECVATEENPQVYFCCCEGNFCNERFTHLPEAGGPEVTYEPPPTAPT

SEQ ID NO: 1114 - protein, 111 aa, synthetic construct
AETQECIYYNANWELERTQQSGLERCEGEQDKRLHCYASWRNSSGTIELVKKGCWLDDFNCYDRQECVATEENPQVYFCCCEGNFCNERFTHLPEAGGPEVTYEPPPTAPT

SEQ ID NO: 1115 - protein, 112 aa, synthetic construct
EAETQECIYYNANWELERTQQSGLERCEGEQDKRLHCYASWRNSSGTIELVKKGCWLDDFNCYDRQECVATEENPQVYFCCCEGNFCNERFTHLPEAGGPEVTYEPPPTAPT

SEQ ID NO: 1116 - protein, 113 aa, synthetic construct
GEAETQECIYYNANWELERTQQSGLERCEGEQDKRLHCYASWRNSSGTIELVKKGCWLDDFNCYDRQECVATEENPQVYFCCCEGNFCNERFTHLPEAGGPEVTYEPPPTAPT

SEQ ID NO: 1117 - protein, 114 aa, synthetic construct
RGEAETQECIYYNANWELERTQQSGLERCEGEQDKRLHCYASWRNSSGTIELVKKGCWLDDFNCYDRQECVATEENPQVYFCCCEGNFCNERFTHLPEAGGPEVTYEPPPTAPT

SEQ ID NO: 1118 - protein, 115 aa, synthetic construct
GRGEAETQECIYYNANWELERTQQSGLERCEGEQDKRLHCYASWRNSSGTIELVKKGCWLDDFNCYDRQECVATEENPQVYFCCCEGNFCNERFTHLPEAGGPEVTYEPPPTAPT

SEQ ID NO: 1119 - protein, 116 aa, synthetic construct
SGRGEAETQECIYYNANWELERTQQSGLERCEGEQDKRLHCYASWRNSSGTIELVKKGCWLDDFNCYDRQECVATEENPQVYFCCCEGNFCNERFTHLPEAGGPEVTYEPPPTAPT

SEQ ID NO: 1120 - protein, 111 aa, synthetic construct
AETRECIYYNANWELERTQQSGLERCEGEQDKRLHCFATWRNSSGTIELVKQGCWLDDFNCYDRQECVATEENPQVYFCCCEGNFCNERFTHLPEAGGPEVTYEPPPTAPT

SEQ ID NO: 1121 - protein, 112 aa, synthetic construct
EAETRECIYYNANWELERTQQSGLERCEGEQDKRLHCFATWRNSSGTIELVKQGCWLDDFNCYDRQECVATEENPQVYFCCCEGNFCNERFTHLPEAGGPEVTYEPPPTAPT

SEQ ID NO: 1122 - protein, 113 aa, synthetic construct
GEAETRECIYYNANWELERTQQSGLERCEGEQDKRLHCFATWRNSSGTIELVKQGCWLDDFNCYDRQECVATEENPQVYFCCCEGNFCNERFTHLPEAGGPEVTYEPPPTAPT

SEQ ID NO: 1123 - protein, 114 aa, synthetic construct
RGEAETRECIYYNANWELERTQQSGLERCEGEQDKRLHCFATWRNSSGTIELVKQGCWLDDFNCYDRQECVATEENPQVYFCCCEGNFCNERFTHLPEAGGPEVTYEPPPTAPT

SEQ ID NO: 1124 - protein, 115 aa, synthetic construct
GRGEAETRECIYYNANWELERTQQSGLERCEGEQDKRLHCFATWRNSSGTIELVKQGCWLDDFNCYDRQECVATEENPQVYFCCCEGNFCNERFTHLPEAGGPEVTYEPPPTAPT

SEQ ID NO: 1125 - protein, 116 aa, synthetic construct
SGRGEAETRECIYYNANWELERTQQSGLERCEGEQDKRLHCFATWRNSSGTIELVKQGCWLDDFNCYDRQECVATEENPQVYFCCCEGNFCNERFTHLPEAGGPEVTYEPPPTAPT

SEQ ID NO: 1126 - protein, 111 aa, synthetic construct
AETRECIYYNANWELERTQQSGLERCYGDKDKRRHCYASWRNSSGTIELVKKGCWLDDINCYDRQECVATEENPQVYFCCCEGNFCNERFTHLPEAGGPEVTYEPPPTAPT

SEQ ID NO: 1127 - protein, 112 aa, synthetic construct
EAETRECIYYNANWELERTQQSGLERCYGDKDKRRHCYASWRNSSGTIELVKKGCWLDDINCYDRQECVATEENPQVYFCCCEGNFCNERFTHLPEAGGPEVTYEPPPTAPT

SEQ ID NO: 1128 - protein, 113 aa, synthetic construct
GEAETRECIYYNANWELERTQQSGLERCYGDKDKRRHCYASWRNSSGTIELVKKGCWLDDINCYDRQECVATEENPQVYFCCCEGNFCNERFTHLPEAGGPEVTYEPPPTAPT

SEQ ID NO: 1129 - protein, 114 aa, synthetic construct
RGEAETRECIYYNANWELERTQQSGLERCYGDKDKRRHCYASWRNSSGTIELVKKGCWLDDINCYDRQECVATEENPQVYFCCCEGNFCNERFTHLPEAGGPEVTYEPPPTAPT

SEQ ID NO: 1130 - protein, 115 aa, synthetic construct
GRGEAETRECIYYNANWELERTQQSGLERCYGDKDKRRHCYASWRNSSGTIELVKKGCWLDDINCYDRQECVATEENPQVYFCCCEGNFCNERFTHLPEAGGPEVTYEPPPTAPT

SEQ ID NO: 1131 - protein, 116 aa, synthetic construct
SGRGEAETRECIYYNANWELERTQQSGLERCYGDKDKRRHCYASWRNSSGTIELVKKGCWLDDINCYDRQECVATEENPQVYFCCCEGNFCNERFTHLPEAGGPEVTYEPPPTAPT

SEQ ID NO: 1132 - protein, 111 aa, synthetic construct
AETRECIYYNANWELERTQQSGLERCEGEQDKRLHCYASWRNSSGTIELVKKGCWLDDFNCYDRQECVATKENPQVYFCCCEGNFCNERFTHLPEAGGPEVTYEPPPTAPT

SEQ ID NO: 1133 - protein, 112 aa, synthetic construct
EAETRECIYYNANWELERTQQSGLERCEGEQDKRLHCYASWRNSSGTIELVKKGCWLDDFNCYDRQECVATKENPQVYFCCCEGNFCNERFTHLPEAGGPEVTYEPPPTAPT

SEQ ID NO: 1134 - protein, 113 aa, synthetic construct
GEAETRECIYYNANWELERTQQSGLERCEGEQDKRLHCYASWRNSSGTIELVKKGCWLDDFNCYDRQECVATKENPQVYFCCCEGNFCNERFTHLPEAGGPEVTYEPPPTAPT

SEQ ID NO: 1135 - protein, 114 aa, synthetic construct
RGEAETRECIYYNANWELERTQQSGLERCEGEQDKRLHCYASWRNSSGTIELVKKGCWLDDFNCYDRQECVATKENPQVYFCCCEGNFCNERFTHLPEAGGPEVTYEPPPTAPT

SEQ ID NO: 1136 - protein, 115 aa, synthetic construct
GRGEAETRECIYYNANWELERTQQSGLERCEGEQDKRLHCYASWRNSSGTIELVKKGCWLDDFNCYDRQECVATKENPQVYFCCCEGNFCNERFTHLPEAGGPEVTYEPPPTAPT

SEQ ID NO: 1137 - protein, 116 aa, synthetic construct
SGRGEAETRECIYYNANWELERTQQSGLERCEGEQDKRLHCYASWRNSSGTIELVKKGCWLDDFNCYDRQECVATKENPQVYFCCCEGNFCNERFTHLPEAGGPEVTYEPPPTAPT

SEQ ID NO: 1138 - protein, 111 aa, synthetic construct
AETRECIYYNANWELERTQQSGLERCEGEQDKRLHCYASWRNSSGTIELVKKGCWLDDINCYDRQECVATEENPQVYFCCCEGNFCNERFTHLPEAGGPEVTYEPPPTAPT

SEQ ID NO: 1139 - protein, 112 aa, synthetic construct
EAETRECIYYNANWELERTQQSGLERCEGEQDKRLHCYASWRNSSGTIELVKKGCWLDDINCYDRQECVATEENPQVYFCCCEGNFCNERFTHLPEAGGPEVTYEPPPTAPT

SEQ ID NO: 1140 - protein, 113 aa, synthetic construct
GEAETRECIYYNANWELERTQQSGLERCEGEQDKRLHCYASWRNSSGTIELVKKGCWLDDINCYDRQECVATEENPQVYFCCCEGNFCNERFTHLPEAGGPEVTYEPPPTAPT

SEQ ID NO: 1141 - protein, 114 aa, synthetic construct
RGEAETRECIYYNANWELERTQQSGLERCEGEQDKRLHCYASWRNSSGTIELVKKGCWLDDINCYDRQECVATEENPQVYFCCCEGNFCNERFTHLPEAGGPEVTYEPPPTAPT

SEQ ID NO: 1142 - protein, 115 aa, synthetic construct
GRGEAETRECIYYNANWELERTQQSGLERCEGEQDKRLHCYASWRNSSGTIELVKKGCWLDDINCYDRQECVATEENPQVYFCCCEGNFCNERFTHLPEAGGPEVTYEPPPTAPT

SEQ ID NO: 1143 - protein, 116 aa, synthetic construct
SGRGEAETRECIYYNANWELERTQQSGLERCEGEQDKRLHCYASWRNSSGTIELVKKGCWLDDINCYDRQECVATEENPQVYFCCCEGNFCNERFTHLPEAGGPEVTYEPPPTAPT

SEQ ID NO: 1144 - protein, 111 aa, synthetic construct
AETRECIYYNANWELERTQQSGLERCEGEQDKRLHCYASWRNSSGTIELVKKGCWLDDINCYDRQECVATKENPQVYFCCCEGNFCNERFTHLPEAGGPEVTYEPPPTAPT

SEQ ID NO: 1145 - protein, 112 aa, synthetic construct
EAETRECIYYNANWELERTQQSGLERCEGEQDKRLHCYASWRNSSGTIELVKKGCWLDDINCYDRQECVATKENPQVYFCCCEGNFCNERFTHLPEAGGPEVTYEPPPTAPT

SEQ ID NO: 1146 - protein, 113 aa, synthetic construct
GEAETRECIYYNANWELERTQQSGLERCEGEQDKRLHCYASWRNSSGTIELVKKGCWLDDINCYDRQECVATKENPQVYFCCCEGNFCNERFTHLPEAGGPEVTYEPPPTAPT

SEQ ID NO: 1147 - protein, 114 aa, synthetic construct
RGEAETRECIYYNANWELERTQQSGLERCEGEQDKRLHCYASWRNSSGTIELVKKGCWLDDINCYDRQECVATKENPQVYFCCCEGNFCNERFTHLPEAGGPEVTYEPPPTAPT

SEQ ID NO: 1148 - protein, 115 aa, synthetic construct
GRGEAETRECIYYNANWELERTQQSGLERCEGEQDKRLHCYASWRNSSGTIELVKKGCWLDDINCYDRQECVATKENPQVYFCCCEGNFCNERFTHLPEAGGPEVTYEPPPTAPT

SEQ ID NO: 1149 - protein, 116 aa, synthetic construct
SGRGEAETRECIYYNANWELERTQQSGLERCEGEQDKRLHCYASWRNSSGTIELVKKGCWLDDINCYDRQECVATKENPQVYFCCCEGNFCNERFTHLPEAGGPEVTYEPPPTAPT

SEQ ID NO: 1150 - protein, 111 aa, synthetic construct
AETRECIYYNANWELERTQQSGLERCEGDKDKRLHCYASWRNSSGTIELVKKGCWLDDINCYDRQECVATKENPQVYFCCCEGNFCNERFTHLPEAGGPEVTYEPPPTAPT

SEQ ID NO: 1151 - protein, 112 aa, synthetic construct
EAETRECIYYNANWELERTQQSGLERCEGDKDKRLHCYASWRNSSGTIELVKKGCWLDDINCYDRQECVATKENPQVYFCCCEGNFCNERFTHLPEAGGPEVTYEPPPTAPT

SEQ ID NO: 1152 - protein, 113 aa, synthetic construct
GEAETRECIYYNANWELERTQQSGLERCEGDKDKRLHCYASWRNSSGTIELVKKGCWLDDINCYDRQECVATKENPQVYFCCCEGNFCNERFTHLPEAGGPEVTYEPPPTAPT

SEQ ID NO: 1153 - protein, 114 aa, synthetic construct
RGEAETRECIYYNANWELERTQQSGLERCEGDKDKRLHCYASWRNSSGTIELVKKGCWLDDINCYDRQECVATKENPQVYFCCCEGNFCNERFTHLPEAGGPEVTYEPPPTAPT

SEQ ID NO: 1154 - protein, 115 aa, synthetic construct
GRGEAETRECIYYNANWELERTQQSGLERCEGDKDKRLHCYASWRNSSGTIELVKKGCWLDDINCYDRQECVATKENPQVYFCCCEGNFCNERFTHLPEAGGPEVTYEPPPTAPT

SEQ ID NO: 1155 - protein, 116 aa, synthetic construct
SGRGEAETRECIYYNANWELERTQQSGLERCEGDKDKRLHCYASWRNSSGTIELVKKGCWLDDINCYDRQECVATKENPQVYFCCCEGNFCNERFTHLPEAGGPEVTYEPPPTAPT

SEQ ID NO: 1156 - protein, 111 aa, synthetic construct
AETRECIYYNANWELERTQQSGLERCEGDQDKRLHCYASWRNSSGTIELVKKGCWLDDINCYDRQECVATKENPQVYFCCCEGNFCNERFTHLPEAGGPEVTYEPPPTAPT

SEQ ID NO: 1157 - protein, 112 aa, synthetic construct
EAETRECIYYNANWELERTQQSGLERCEGDQDKRLHCYASWRNSSGTIELVKKGCWLDDINCYDRQECVATKENPQVYFCCCEGNFCNERFTHLPEAGGPEVTYEPPPTAPT

SEQ ID NO: 1158 - protein, 113 aa, synthetic construct
GEAETRECIYYNANWELERTQQSGLERCEGDQDKRLHCYASWRNSSGTIELVKKGCWLDDINCYDRQECVATKENPQVYFCCCEGNFCNERFTHLPEAGGPEVTYEPPPTAPT

SEQ ID NO: 1159 - protein, 114 aa, synthetic construct
RGEAETRECIYYNANWELERTQQSGLERCEGDQDKRLHCYASWRNSSGTIELVKKGCWLDDINCYDRQECVATKENPQVYFCCCEGNFCNERFTHLPEAGGPEVTYEPPPTAPT

SEQ ID NO: 1160 - protein, 115 aa, synthetic construct
GRGEAETRECIYYNANWELERTQQSGLERCEGDQDKRLHCYASWRNSSGTIELVKKGCWLDDINCYDRQECVATKENPQVYFCCCEGNFCNERFTHLPEAGGPEVTYEPPPTAPT

SEQ ID NO: 1161 - protein, 116 aa, synthetic construct
SGRGEAETRECIYYNANWELERTQQSGLERCEGDQDKRLHCYASWRNSSGTIELVKKGCWLDDINCYDRQECVATKENPQVYFCCCEGNFCNERFTHLPEAGGPEVTYEPPPTAPT

SEQ ID NO: 1162 - protein, 111 aa, synthetic construct
AETRECIYYNANWELERTQQSGLERCEGDQDKRLHCYASWRNSSGTIELVKKGCWLDDFNCYDRQECVATKENPQVYFCCCEGNFCNERFTHLPEAGGPEVTYEPPPTAPT

SEQ ID NO: 1163 - protein, 112 aa, synthetic construct
EAETRECIYYNANWELERTQQSGLERCEGDQDKRLHCYASWRNSSGTIELVKKGCWLDDFNCYDRQECVATKENPQVYFCCCEGNFCNERFTHLPEAGGPEVTYEPPPTAPT

SEQ ID NO: 1164 - protein, 113 aa, synthetic construct
GEAETRECIYYNANWELERTQQSGLERCEGDQDKRLHCYASWRNSSGTIELVKKGCWLDDFNCYDRQECVATKENPQVYFCCCEGNFCNERFTHLPEAGGPEVTYEPPPTAPT

SEQ ID NO: 1165 - protein, 114 aa, synthetic construct
RGEAETRECIYYNANWELERTQQSGLERCEGDQDKRLHCYASWRNSSGTIELVKKGCWLDDFNCYDRQECVATKENPQVYFCCCEGNFCNERFTHLPEAGGPEVTYEPPPTAPT

SEQ ID NO: 1166 - protein, 115 aa, synthetic construct
GRGEAETRECIYYNANWELERTQQSGLERCEGDQDKRLHCYASWRNSSGTIELVKKGCWLDDFNCYDRQECVATKENPQVYFCCCEGNFCNERFTHLPEAGGPEVTYEPPPTAPT

SEQ ID NO: 1167 - protein, 116 aa, synthetic construct
SGRGEAETRECIYYNANWELERTQQSGLERCEGDQDKRLHCYASWRNSSGTIELVKKGCWLDDFNCYDRQECVATKENPQVYFCCCEGNFCNERFTHLPEAGGPEVTYEPPPTAPT

SEQ ID NO: 1168 - protein, 111 aa, synthetic construct
AETRECIYYNANWELERTQQSGLERCEGDQDKRLHCYASWRNSSGTIELVKKGCWLDDFNCYDRQECVATEENPQVYFCCCEGNFCNERFTHLPEAGGPEVTYEPPPTAPT

SEQ ID NO: 1169 - protein, 112 aa, synthetic construct
EAETRECIYYNANWELERTQQSGLERCEGDQDKRLHCYASWRNSSGTIELVKKGCWLDDFNCYDRQECVATEENPQVYFCCCEGNFCNERFTHLPEAGGPEVTYEPPPTAPT

SEQ ID NO: 1170 - protein, 113 aa, synthetic construct
GEAETRECIYYNANWELERTQQSGLERCEGDQDKRLHCYASWRNSSGTIELVKKGCWLDDFNCYDRQECVATEENPQVYFCCCEGNFCNERFTHLPEAGGPEVTYEPPPTAPT

SEQ ID NO: 1171 - protein, 114 aa, synthetic construct
RGEAETRECIYYNANWELERTQQSGLERCEGDQDKRLHCYASWRNSSGTIELVKKGCWLDDFNCYDRQECVATEENPQVYFCCCEGNFCNERFTHLPEAGGPEVTYEPPPTAPT

SEQ ID NO: 1172 - protein, 115 aa, synthetic construct
GRGEAETRECIYYNANWELERTQQSGLERCEGDQDKRLHCYASWRNSSGTIELVKKGCWLDDFNCYDRQECVATEENPQVYFCCCEGNFCNERFTHLPEAGGPEVTYEPPPTAPT

SEQ ID NO: 1173 - protein, 116 aa, synthetic construct
SGRGEAETRECIYYNANWELERTQQSGLERCEGDQDKRLHCYASWRNSSGTIELVKKGCWLDDFNCYDRQECVATEENPQVYFCCCEGNFCNERFTHLPEAGGPEVTYEPPPTAPT

SEQ ID NO: 1174 - protein, 111 aa, synthetic construct
AETRECIYYNANWELERTQQSGLERCYGDKDKRRHCYASWRNSSGTIELVKKGCWLDDINCYDRQECVEKKDSPEVYFCCCEGNFCNERFTHLPEAGGPEVTYEPPPTAPT

SEQ ID NO: 1175 - protein, 112 aa, synthetic construct
EAETRECIYYNANWELERTQQSGLERCYGDKDKRRHCYASWRNSSGTIELVKKGCWLDDINCYDRQECVEKKDSPEVYFCCCEGNFCNERFTHLPEAGGPEVTYEPPPTAPT

SEQ ID NO: 1176 - protein, 113 aa, synthetic construct
GEAETRECIYYNANWELERTQQSGLERCYGDKDKRRHCYASWRNSSGTIELVKKGCWLDDINCYDRQECVEKKDSPEVYFCCCEGNFCNERFTHLPEAGGPEVTYEPPPTAPT

SEQ ID NO: 1177 - protein, 114 aa, synthetic construct
RGEAETRECIYYNANWELERTQQSGLERCYGDKDKRRHCYASWRNSSGTIELVKKGCWLDDINCYDRQECVEKKDSPEVYFCCCEGNFCNERFTHLPEAGGPEVTYEPPPTAPT

SEQ ID NO: 1178 - protein, 115 aa, synthetic construct
GRGEAETRECIYYNANWELERTQQSGLERCYGDKDKRRHCYASWRNSSGTIELVKKGCWLDDINCYDRQECVEKKDSPEVYFCCCEGNFCNERFTHLPEAGGPEVTYEPPPTAPT

SEQ ID NO: 1179 - protein, 116 aa, synthetic construct
SGRGEAETRECIYYNANWELERTQQSGLERCYGDKDKRRHCYASWRNSSGTIELVKKGCWLDDINCYDRQECVEKKDSPEVYFCCCEGNFCNERFTHLPEAGGPEVTYEPPPTAPT

SEQ ID NO: 1180 - protein, 111 aa, synthetic construct
AETRECIFFNANWEKDRTQQTGVEPCEGEQDKRLHCYASWRNSSGTIELVKKGCWLDDFNCYDRQECVATEENPQVYFCCCEGNFCNERFTHLPEAGGPEVTYEPPPTAPT

SEQ ID NO: 1181 - protein, 112 aa, synthetic construct
EAETRECIFFNANWEKDRTQQTGVEPCEGEQDKRLHCYASWRNSSGTIELVKKGCWLDDFNCYDRQECVATEENPQVYFCCCEGNFCNERFTHLPEAGGPEVTYEPPPTAPT

SEQ ID NO: 1182 - protein, 113 aa, synthetic construct
GEAETRECIFFNANWEKDRTQQTGVEPCEGEQDKRLHCYASWRNSSGTIELVKKGCWLDDFNCYDRQECVATEENPQVYFCCCEGNFCNERFTHLPEAGGPEVTYEPPPTAPT

SEQ ID NO: 1183 - protein, 114 aa, synthetic construct
RGEAETRECIFFNANWEKDRTQQTGVEPCEGEQDKRLHCYASWRNSSGTIELVKKGCWLDDFNCYDRQECVATEENPQVYFCCCEGNFCNERFTHLPEAGGPEVTYEPPPTAPT

SEQ ID NO: 1184 - protein, 115 aa, synthetic construct
GRGEAETRECIFFNANWEKDRTQQTGVEPCEGEQDKRLHCYASWRNSSGTIELVKKGCWLDDFNCYDRQECVATEENPQVYFCCCEGNFCNERFTHLPEAGGPEVTYEPPPTAPT

SEQ ID NO: 1185 - protein, 116 aa, synthetic construct
SGRGEAETRECIFFNANWEKDRTQQTGVEPCEGEQDKRLHCYASWRNSSGTIELVKKGCWLDDFNCYDRQECVATEENPQVYFCCCEGNFCNERFTHLPEAGGPEVTYEPPPTAPT

SEQ ID NO: 1186 - protein, 111 aa, synthetic construct
AETRECIYYNANWELERTQQSGLERCEGEQDKRLHCFATWKNISGSIELVKQGCWLDDFNCYDRQECVATEENPQVYFCCCEGNFCNERFTHLPEAGGPEVTYEPPPTAPT

SEQ ID NO: 1187 - protein, 112 aa, synthetic construct
EAETRECIYYNANWELERTQQSGLERCEGEQDKRLHCFATWKNISGSIELVKQGCWLDDFNCYDRQECVATEENPQVYFCCCEGNFCNERFTHLPEAGGPEVTYEPPPTAPT

SEQ ID NO: 1188 - protein, 113 aa, synthetic construct
GEAETRECIYYNANWELERTQQSGLERCEGEQDKRLHCFATWKNISGSIELVKQGCWLDDFNCYDRQECVATEENPQVYFCCCEGNFCNERFTHLPEAGGPEVTYEPPPTAPT

SEQ ID NO: 1189 - protein, 114 aa, synthetic construct
RGEAETRECIYYNANWELERTQQSGLERCEGEQDKRLHCFATWKNISGSIELVKQGCWLDDFNCYDRQECVATEENPQVYFCCCEGNFCNERFTHLPEAGGPEVTYEPPPTAPT

SEQ ID NO: 1190 - protein, 115 aa, synthetic construct
GRGEAETRECIYYNANWELERTQQSGLERCEGEQDKRLHCFATWKNISGSIELVKQGCWLDDFNCYDRQECVATEENPQVYFCCCEGNFCNERFTHLPEAGGPEVTYEPPPTAPT

SEQ ID NO: 1191 - protein, 116 aa, synthetic construct
SGRGEAETRECIYYNANWELERTQQSGLERCEGEQDKRLHCFATWKNISGSIELVKQGCWLDDFNCYDRQECVATEENPQVYFCCCEGNFCNERFTHLPEAGGPEVTYEPPPTAPT

SEQ ID NO: 1192 - protein, 111 aa, synthetic construct
AETRECIYYNANWELERTQQSGLERCEGEQDKRLHCYASWRNSSGTIELVKKGCWLDDFNCYDRTDCVATEENPQVYFCCCEGNFCNERFTHLPEAGGPEVTYEPPPTAPT

SEQ ID NO: 1193 - protein, 112 aa, synthetic construct
EAETRECIYYNANWELERTQQSGLERCEGEQDKRLHCYASWRNSSGTIELVKKGCWLDDFNCYDRTDCVATEENPQVYFCCCEGNFCNERFTHLPEAGGPEVTYEPPPTAPT

SEQ ID NO: 1194 - protein, 113 aa, synthetic construct
GEAETRECIYYNANWELERTQQSGLERCEGEQDKRLHCYASWRNSSGTIELVKKGCWLDDFNCYDRTDCVATEENPQVYFCCCEGNFCNERFTHLPEAGGPEVTYEPPPTAPT

SEQ ID NO: 1195 - protein, 114 aa, synthetic construct
RGEAETRECIYYNANWELERTQQSGLERCEGEQDKRLHCYASWRNSSGTIELVKKGCWLDDFNCYDRTDCVATEENPQVYFCCCEGNFCNERFTHLPEAGGPEVTYEPPPTAPT

SEQ ID NO: 1196 - protein, 115 aa, synthetic construct
GRGEAETRECIYYNANWELERTQQSGLERCEGEQDKRLHCYASWRNSSGTIELVKKGCWLDDFNCYDRTDCVATEENPQVYFCCCEGNFCNERFTHLPEAGGPEVTYEPPPTAPT

SEQ ID NO: 1197 - protein, 116 aa, synthetic construct
SGRGEAETRECIYYNANWELERTQQSGLERCEGEQDKRLHCYASWRNSSGTIELVKKGCWLDDFNCYDRTDCVATEENPQVYFCCCEGNFCNERFTHLPEAGGPEVTYEPPPTAPT

SEQ ID NO: 1198 - protein, 111 aa, synthetic construct
AETRECIYYNANWELERTQQSGLERCEGEQDKRLHCYASWRNSSGTIELVKKGCWLDDFNCYDRQECVATEENPQVYFCCCEGNMCNERFTHLPEAGGPEVTYEPPPTAPT

SEQ ID NO: 1199 - protein, 112 aa, synthetic construct
EAETRECIYYNANWELERTQQSGLERCEGEQDKRLHCYASWRNSSGTIELVKKGCWLDDFNCYDRQECVATEENPQVYFCCCEGNMCNERFTHLPEAGGPEVTYEPPPTAPT

SEQ ID NO: 1200 - protein, 113 aa, synthetic construct
GEAETRECIYYNANWELERTQQSGLERCEGEQDKRLHCYASWRNSSGTIELVKKGCWLDDFNCYDRQECVATEENPQVYFCCCEGNMCNERFTHLPEAGGPEVTYEPPPTAPT

SEQ ID NO: 1201 - protein, 114 aa, synthetic construct
RGEAETRECIYYNANWELERTQQSGLERCEGEQDKRLHCYASWRNSSGTIELVKKGCWLDDFNCYDRQECVATEENPQVYFCCCEGNMCNERFTHLPEAGGPEVTYEPPPTAPT

SEQ ID NO: 1202 - protein, 115 aa, synthetic construct
GRGEAETRECIYYNANWELERTQQSGLERCEGEQDKRLHCYASWRNSSGTIELVKKGCWLDDFNCYDRQECVATEENPQVYFCCCEGNMCNERFTHLPEAGGPEVTYEPPPTAPT

SEQ ID NO: 1203 - protein, 116 aa, synthetic construct
SGRGEAETRECIYYNANWELERTQQSGLERCEGEQDKRLHCYASWRNSSGTIELVKKGCWLDDFNCYDRQECVATEENPQVYFCCCEGNMCNERFTHLPEAGGPEVTYEPPPTAPT

SEQ ID NO: 1204 - protein, 111 aa, synthetic construct
AETRECIYYNANWELERTQQSGLERCEGDQDKRLHCYASWRNSSGTIELVKKGCWLDDINCYDRQECVATEENPQVYFCCCEGNFCNERFTHLPEAGGPEVTYEPPPTAPT

SEQ ID NO: 1205 - protein, 112 aa, synthetic construct
EAETRECIYYNANWELERTQQSGLERCEGDQDKRLHCYASWRNSSGTIELVKKGCWLDDINCYDRQECVATEENPQVYFCCCEGNFCNERFTHLPEAGGPEVTYEPPPTAPT

SEQ ID NO: 1206 - protein, 113 aa, synthetic construct
GEAETRECIYYNANWELERTQQSGLERCEGDQDKRLHCYASWRNSSGTIELVKKGCWLDDINCYDRQECVATEENPQVYFCCCEGNFCNERFTHLPEAGGPEVTYEPPPTAPT

SEQ ID NO: 1207 - protein, 114 aa, synthetic construct
RGEAETRECIYYNANWELERTQQSGLERCEGDQDKRLHCYASWRNSSGTIELVKKGCWLDDINCYDRQECVATEENPQVYFCCCEGNFCNERFTHLPEAGGPEVTYEPPPTAPT

SEQ ID NO: 1208 - protein, 115 aa, synthetic construct
GRGEAETRECIYYNANWELERTQQSGLERCEGDQDKRLHCYASWRNSSGTIELVKKGCWLDDINCYDRQECVATEENPQVYFCCCEGNFCNERFTHLPEAGGPEVTYEPPPTAPT

SEQ ID NO: 1209 - protein, 116 aa, synthetic construct
SGRGEAETRECIYYNANWELERTQQSGLERCEGDQDKRLHCYASWRNSSGTIELVKKGCWLDDINCYDRQECVATEENPQVYFCCCEGNFCNERFTHLPEAGGPEVTYEPPPTAPT

SEQ ID NO: 1210 - protein, 111 aa, synthetic construct
AETQECLFFNANWEKDRTQQSGVEPCYGDKDKRRHCYASWRNSSGTIELVKKGCWLDDFNCYDRQECVATEENPQVYFCCCEGNFCNERFTHLPEAGGPEVTYEPPPTAPT

SEQ ID NO: 1211 - protein, 112 aa, synthetic construct
EAETQECLFFNANWEKDRTQQSGVEPCYGDKDKRRHCYASWRNSSGTIELVKKGCWLDDFNCYDRQECVATEENPQVYFCCCEGNFCNERFTHLPEAGGPEVTYEPPPTAPT

SEQ ID NO: 1212 - protein, 113 aa, synthetic construct
GEAETQECLFFNANWEKDRTQQSGVEPCYGDKDKRRHCYASWRNSSGTIELVKKGCWLDDFNCYDRQECVATEENPQVYFCCCEGNFCNERFTHLPEAGGPEVTYEPPPTAPT

SEQ ID NO: 1213 - protein, 114 aa, synthetic construct
RGEAETQECLFFNANWEKDRTQQSGVEPCYGDKDKRRHCYASWRNSSGTIELVKKGCWLDDFNCYDRQECVATEENPQVYFCCCEGNFCNERFTHLPEAGGPEVTYEPPPTAPT

SEQ ID NO: 1214 - protein, 115 aa, synthetic construct
GRGEAETQECLFFNANWEKDRTQQSGVEPCYGDKDKRRHCYASWRNSSGTIELVKKGCWLDDFNCYDRQECVATEENPQVYFCCCEGNFCNERFTHLPEAGGPEVTYEPPPTAPT

SEQ ID NO: 1215 - protein, 116 aa, synthetic construct
SGRGEAETQECLFFNANWEKDRTQQSGVEPCYGDKDKRRHCYASWRNSSGTIELVKKGCWLDDFNCYDRQECVATEENPQVYFCCCEGNFCNERFTHLPEAGGPEVTYEPPPTAPT

SEQ ID NO: 1216 - protein, 111 aa, synthetic construct
AETQECLFFNANWEKDRTQQSGVEPCEGEQDKRLHCYASWRNSSGTIELVKKGCWLDDFNCYDRQECVATEENPQVYFCCCEGNFCNERFTHLPEAGGPEVTYEPPPTAPT

SEQ ID NO: 1217 - protein, 112 aa, synthetic construct
EAETQECLFFNANWEKDRTQQSGVEPCEGEQDKRLHCYASWRNSSGTIELVKKGCWLDDFNCYDRQECVATEENPQVYFCCCEGNFCNERFTHLPEAGGPEVTYEPPPTAPT

SEQ ID NO: 1218 - protein, 113 aa, synthetic construct
GEAETQECLFFNANWEKDRTQQSGVEPCEGEQDKRLHCYASWRNSSGTIELVKKGCWLDDFNCYDRQECVATEENPQVYFCCCEGNFCNERFTHLPEAGGPEVTYEPPPTAPT

SEQ ID NO: 1219 - protein, 114 aa, synthetic construct
RGEAETQECLFFNANWEKDRTQQSGVEPCEGEQDKRLHCYASWRNSSGTIELVKKGCWLDDFNCYDRQECVATEENPQVYFCCCEGNFCNERFTHLPEAGGPEVTYEPPPTAPT

SEQ ID NO: 1220 - protein, 115 aa, synthetic construct
GRGEAETQECLFFNANWEKDRTQQSGVEPCEGEQDKRLHCYASWRNSSGTIELVKKGCWLDDFNCYDRQECVATEENPQVYFCCCEGNFCNERFTHLPEAGGPEVTYEPPPTAPT

SEQ ID NO: 1221 - protein, 116 aa, synthetic construct
SGRGEAETQECLFFNANWEKDRTQQSGVEPCEGEQDKRLHCYASWRNSSGTIELVKKGCWLDDFNCYDRQECVATEENPQVYFCCCEGNFCNERFTHLPEAGGPEVTYEPPPTAPT

SEQ ID NO: 1222 - protein, 111 aa, synthetic construct
AETRECLFFNANWEKDRTQQSGVEPCEGEQDKRLHCYASWRNSSGTIELVKKGCWLDDFNCYDRQECVATEENPQVYFCCCEGNFCNERFTHLPEAGGPEVTYEPPPTAPT

SEQ ID NO: 1223 - protein, 112 aa, synthetic construct
EAETRECLFFNANWEKDRTQQSGVEPCEGEQDKRLHCYASWRNSSGTIELVKKGCWLDDFNCYDRQECVATEENPQVYFCCCEGNFCNERFTHLPEAGGPEVTYEPPPTAPT

SEQ ID NO: 1224 - protein, 113 aa, synthetic construct
GEAETRECLFFNANWEKDRTQQSGVEPCEGEQDKRLHCYASWRNSSGTIELVKKGCWLDDFNCYDRQECVATEENPQVYFCCCEGNFCNERFTHLPEAGGPEVTYEPPPTAPT

SEQ ID NO: 1225 - protein, 114 aa, synthetic construct
RGEAETRECLFFNANWEKDRTQQSGVEPCEGEQDKRLHCYASWRNSSGTIELVKKGCWLDDFNCYDRQECVATEENPQVYFCCCEGNFCNERFTHLPEAGGPEVTYEPPPTAPT

SEQ ID NO: 1226 - protein, 115 aa, synthetic construct
GRGEAETRECLFFNANWEKDRTQQSGVEPCEGEQDKRLHCYASWRNSSGTIELVKKGCWLDDFNCYDRQECVATEENPQVYFCCCEGNFCNERFTHLPEAGGPEVTYEPPPTAPT

SEQ ID NO: 1227 - protein, 116 aa, synthetic construct
SGRGEAETRECLFFNANWEKDRTQQSGVEPCEGEQDKRLHCYASWRNSSGTIELVKKGCWLDDFNCYDRQECVATEENPQVYFCCCEGNFCNERFTHLPEAGGPEVTYEPPPTAPT

SEQ ID NO: 1228 - protein, 111 aa, synthetic construct
AETQECLFFNANWEKDRTQQSGVEPCYGEQDKRLHCYASWRNSSGTIELVKKGCWLDDFNCYDRQECVATEENPQVYFCCCEGNFCNERFTHLPEAGGPEVTYEPPPTAPT

SEQ ID NO: 1229 - protein, 112 aa, synthetic construct
EAETQECLFFNANWEKDRTQQSGVEPCYGEQDKRLHCYASWRNSSGTIELVKKGCWLDDFNCYDRQECVATEENPQVYFCCCEGNFCNERFTHLPEAGGPEVTYEPPPTAPT

SEQ ID NO: 1230 - protein, 113 aa, synthetic construct
GEAETQECLFFNANWEKDRTQQSGVEPCYGEQDKRLHCYASWRNSSGTIELVKKGCWLDDFNCYDRQECVATEENPQVYFCCCEGNFCNERFTHLPEAGGPEVTYEPPPTAPT

SEQ ID NO: 1231 - protein, 114 aa, synthetic construct
RGEAETQECLFFNANWEKDRTQQSGVEPCYGEQDKRLHCYASWRNSSGTIELVKKGCWLDDFNCYDRQECVATEENPQVYFCCCEGNFCNERFTHLPEAGGPEVTYEPPPTAPT

SEQ ID NO: 1232 - protein, 115 aa, synthetic construct
GRGEAETQECLFFNANWEKDRTQQSGVEPCYGEQDKRLHCYASWRNSSGTIELVKKGCWLDDFNCYDRQECVATEENPQVYFCCCEGNFCNERFTHLPEAGGPEVTYEPPPTAPT

SEQ ID NO: 1233 - protein, 116 aa, synthetic construct
SGRGEAETQECLFFNANWEKDRTQQSGVEPCYGEQDKRLHCYASWRNSSGTIELVKKGCWLDDFNCYDRQECVATEENPQVYFCCCEGNFCNERFTHLPEAGGPEVTYEPPPTAPT

SEQ ID NO: 1234 - protein, 111 aa, synthetic construct
AETRECLFFNANWEKDRTQQSGVEPCYGDKDKRRHCYASWRNSSGTIELVKKGCWLDDFNCYDRQECVATEENPQVYFCCCEGNFCNERFTHLPEAGGPEVTYEPPPTAPT

SEQ ID NO: 1235 - protein, 112 aa, synthetic construct
EAETRECLFFNANWEKDRTQQSGVEPCYGDKDKRRHCYASWRNSSGTIELVKKGCWLDDFNCYDRQECVATEENPQVYFCCCEGNFCNERFTHLPEAGGPEVTYEPPPTAPT

SEQ ID NO: 1236 - protein, 113 aa, synthetic construct
GEAETRECLFFNANWEKDRTQQSGVEPCYGDKDKRRHCYASWRNSSGTIELVKKGCWLDDFNCYDRQECVATEENPQVYFCCCEGNFCNERFTHLPEAGGPEVTYEPPPTAPT

SEQ ID NO: 1237 - protein, 114 aa, synthetic construct
RGEAETRECLFFNANWEKDRTQQSGVEPCYGDKDKRRHCYASWRNSSGTIELVKKGCWLDDFNCYDRQECVATEENPQVYFCCCEGNFCNERFTHLPEAGGPEVTYEPPPTAPT

SEQ ID NO: 1238 - protein, 115 aa, synthetic construct
GRGEAETRECLFFNANWEKDRTQQSGVEPCYGDKDKRRHCYASWRNSSGTIELVKKGCWLDDFNCYDRQECVATEENPQVYFCCCEGNFCNERFTHLPEAGGPEVTYEPPPTAPT

SEQ ID NO: 1239 - protein, 116 aa, synthetic construct
SGRGEAETRECLFFNANWEKDRTQQSGVEPCYGDKDKRRHCYASWRNSSGTIELVKKGCWLDDFNCYDRQECVATEENPQVYFCCCEGNFCNERFTHLPEAGGPEVTYEPPPTAPT

SEQ ID NO: 1240 - protein, 111 aa, synthetic construct
AETRECLFFNANWEKDRTQQTGVEPCYGDKDKRRHCFATWKNISGSIEIVKQGCWLDDFNCYDRQECVATEENPQVYFCCCEGNFCNERFTHLPEAGGPEVTYEPPPTAPT

SEQ ID NO: 1241 - protein, 112 aa, synthetic construct
EAETRECLFFNANWEKDRTQQTGVEPCYGDKDKRRHCFATWKNISGSIEIVKQGCWLDDFNCYDRQECVATEENPQVYFCCCEGNFCNERFTHLPEAGGPEVTYEPPPTAPT

SEQ ID NO: 1242 - protein, 113 aa, synthetic construct
GEAETRECLFFNANWEKDRTQQTGVEPCYGDKDKRRHCFATWKNISGSIEIVKQGCWLDDFNCYDRQECVATEENPQVYFCCCEGNFCNERFTHLPEAGGPEVTYEPPPTAPT

SEQ ID NO: 1243 - protein, 114 aa, synthetic construct
RGEAETRECLFFNANWEKDRTQQTGVEPCYGDKDKRRHCFATWKNISGSIEIVKQGCWLDDFNCYDRQECVATEENPQVYFCCCEGNFCNERFTHLPEAGGPEVTYEPPPTAPT

SEQ ID NO: 1244 - protein, 115 aa, synthetic construct
GRGEAETRECLFFNANWEKDRTQQTGVEPCYGDKDKRRHCFATWKNISGSIEIVKQGCWLDDFNCYDRQECVATEENPQVYFCCCEGNFCNERFTHLPEAGGPEVTYEPPPTAPT

SEQ ID NO: 1245 - protein, 116 aa, synthetic construct
SGRGEAETRECLFFNANWEKDRTQQTGVEPCYGDKDKRRHCFATWKNISGSIEIVKQGCWLDDFNCYDRQECVATEENPQVYFCCCEGNFCNERFTHLPEAGGPEVTYEPPPTAPT

SEQ ID NO: 1246 - protein, 111 aa, synthetic construct
AETRECLFFNANWEKDRTQQTGVEPCYGDKDKRRHCFATWKNISGSIEIVKQGCWLDDINCYDRQECVATEENPQVYFCCCEGNFCNERFTHLPEAGGPEVTYEPPPTAPT

SEQ ID NO: 1247 - protein, 112 aa, synthetic construct
EAETRECLFFNANWEKDRTQQTGVEPCYGDKDKRRHCFATWKNISGSIEIVKQGCWLDDINCYDRQECVATEENPQVYFCCCEGNFCNERFTHLPEAGGPEVTYEPPPTAPT

SEQ ID NO: 1248 - protein, 113 aa, synthetic construct
GEAETRECLFFNANWEKDRTQQTGVEPCYGDKDKRRHCFATWKNISGSIEIVKQGCWLDDINCYDRQECVATEENPQVYFCCCEGNFCNERFTHLPEAGGPEVTYEPPPTAPT

SEQ ID NO: 1249 - protein, 114 aa, synthetic construct
RGEAETRECLFFNANWEKDRTQQTGVEPCYGDKDKRRHCFATWKNISGSIEIVKQGCWLDDINCYDRQECVATEENPQVYFCCCEGNFCNERFTHLPEAGGPEVTYEPPPTAPT

SEQ ID NO: 1250 - protein, 115 aa, synthetic construct
GRGEAETRECLFFNANWEKDRTQQTGVEPCYGDKDKRRHCFATWKNISGSIEIVKQGCWLDDINCYDRQECVATEENPQVYFCCCEGNFCNERFTHLPEAGGPEVTYEPPPTAPT

SEQ ID NO: 1251 - protein, 116 aa, synthetic construct
SGRGEAETRECLFFNANWEKDRTQQTGVEPCYGDKDKRRHCFATWKNISGSIEIVKQGCWLDDINCYDRQECVATEENPQVYFCCCEGNFCNERFTHLPEAGGPEVTYEPPPTAPT

SEQ ID NO: 1252 - protein, 111 aa, synthetic construct
AETRECLFFNANWEKDRTQQTGVEPCYGDKDKRRHCFATWKNISGSIEIVKQGCWLDDINCYDRTDCVEKKDSPEVYFCCCEGNFCNERFTHLPEAGGPEVTYEPPPTAPT

SEQ ID NO: 1253 - protein, 112 aa, synthetic construct
EAETRECLFFNANWEKDRTQQTGVEPCYGDKDKRRHCFATWKNISGSIEIVKQGCWLDDINCYDRTDCVEKKDSPEVYFCCCEGNFCNERFTHLPEAGGPEVTYEPPPTAPT

SEQ ID NO: 1254 - protein, 113 aa, synthetic construct
GEAETRECLFFNANWEKDRTQQTGVEPCYGDKDKRRHCFATWKNISGSIEIVKQGCWLDDINCYDRTDCVEKKDSPEVYFCCCEGNFCNERFTHLPEAGGPEVTYEPPPTAPT

SEQ ID NO: 1255 - protein, 114 aa, synthetic construct
RGEAETRECLFFNANWEKDRTQQTGVEPCYGDKDKRRHCFATWKNISGSIEIVKQGCWLDDINCYDRTDCVEKKDSPEVYFCCCEGNFCNERFTHLPEAGGPEVTYEPPPTAPT

SEQ ID NO: 1256 - protein, 115 aa, synthetic construct
GRGEAETRECLFFNANWEKDRTQQTGVEPCYGDKDKRRHCFATWKNISGSIEIVKQGCWLDDINCYDRTDCVEKKDSPEVYFCCCEGNFCNERFTHLPEAGGPEVTYEPPPTAPT

SEQ ID NO: 1257 - protein, 116 aa, synthetic construct
SGRGEAETRECLFFNANWEKDRTQQTGVEPCYGDKDKRRHCFATWKNISGSIEIVKQGCWLDDINCYDRTDCVEKKDSPEVYFCCCEGNFCNERFTHLPEAGGPEVTYEPPPTAPT

SEQ ID NO: 1258 - protein, 111 aa, synthetic construct
AETQECIYYNANWELERTQQSGLERCYGDKDKRRHCFATWKNISGSIEIVKQGCWLDDINCYDRQECVATEENPQVYFCCCEGNFCNERFTHLPEAGGPEVTYEPPPTAPT

SEQ ID NO: 1259 - protein, 112 aa, synthetic construct
EAETQECIYYNANWELERTQQSGLERCYGDKDKRRHCFATWKNISGSIEIVKQGCWLDDINCYDRQECVATEENPQVYFCCCEGNFCNERFTHLPEAGGPEVTYEPPPTAPT

SEQ ID NO: 1260 - protein, 113 aa, synthetic construct
GEAETQECIYYNANWELERTQQSGLERCYGDKDKRRHCFATWKNISGSIEIVKQGCWLDDINCYDRQECVATEENPQVYFCCCEGNFCNERFTHLPEAGGPEVTYEPPPTAPT

SEQ ID NO: 1261 - protein, 114 aa, synthetic construct
RGEAETQECIYYNANWELERTQQSGLERCYGDKDKRRHCFATWKNISGSIEIVKQGCWLDDINCYDRQECVATEENPQVYFCCCEGNFCNERFTHLPEAGGPEVTYEPPPTAPT

SEQ ID NO: 1262 - protein, 115 aa, synthetic construct
GRGEAETQECIYYNANWELERTQQSGLERCYGDKDKRRHCFATWKNISGSIEIVKQGCWLDDINCYDRQECVATEENPQVYFCCCEGNFCNERFTHLPEAGGPEVTYEPPPTAPT

SEQ ID NO: 1263 - protein, 116 aa, synthetic construct
SGRGEAETQECIYYNANWELERTQQSGLERCYGDKDKRRHCFATWKNISGSIEIVKQGCWLDDINCYDRQECVATEENPQVYFCCCEGNFCNERFTHLPEAGGPEVTYEPPPTAPT

SEQ ID NO: 1264 - protein, 111 aa, synthetic construct
AETRECIYYNANWELERTQQSGLERCYGDKDKRRHCFATWKNISGSIEIVKQGCWLDDINCYDRTDCVEKKDSPEVYFCCCEGNFCNERFTHLPEAGGPEVTYEPPPTAPT

SEQ ID NO: 1265 - protein, 112 aa, synthetic construct
EAETRECIYYNANWELERTQQSGLERCYGDKDKRRHCFATWKNISGSIEIVKQGCWLDDINCYDRTDCVEKKDSPEVYFCCCEGNFCNERFTHLPEAGGPEVTYEPPPTAPT

SEQ ID NO: 1266 - protein, 113 aa, synthetic construct
GEAETRECIYYNANWELERTQQSGLERCYGDKDKRRHCFATWKNISGSIEIVKQGCWLDDINCYDRTDCVEKKDSPEVYFCCCEGNFCNERFTHLPEAGGPEVTYEPPPTAPT

SEQ ID NO: 1267 - protein, 114 aa, synthetic construct
RGEAETRECIYYNANWELERTQQSGLERCYGDKDKRRHCFATWKNISGSIEIVKQGCWLDDINCYDRTDCVEKKDSPEVYFCCCEGNFCNERFTHLPEAGGPEVTYEPPPTAPT

SEQ ID NO: 1268 - protein, 115 aa, synthetic construct
GRGEAETRECIYYNANWELERTQQSGLERCYGDKDKRRHCFATWKNISGSIEIVKQGCWLDDINCYDRTDCVEKKDSPEVYFCCCEGNFCNERFTHLPEAGGPEVTYEPPPTAPT

SEQ ID NO: 1269 - protein, 116 aa, synthetic construct
SGRGEAETRECIYYNANWELERTQQSGLERCYGDKDKRRHCFATWKNISGSIEIVKQGCWLDDINCYDRTDCVEKKDSPEVYFCCCEGNFCNERFTHLPEAGGPEVTYEPPPTAPT

SEQ ID NO: 1270 - protein, 111 aa, synthetic construct
AETRECIYYNANWELERTQQSGLERCYGDKDKRRHCFATWKNISGSIEIVKQGCWLDDINCYDRTDCVEKKDSPEVYFCCCEGNMCNERFTHLPEAGGPEVTYEPPPTAPT

SEQ ID NO: 1271 - protein, 112 aa, synthetic construct
EAETRECIYYNANWELERTQQSGLERCYGDKDKRRHCFATWKNISGSIEIVKQGCWLDDINCYDRTDCVEKKDSPEVYFCCCEGNMCNERFTHLPEAGGPEVTYEPPPTAPT

SEQ ID NO: 1272 - protein, 113 aa, synthetic construct
GEAETRECIYYNANWELERTQQSGLERCYGDKDKRRHCFATWKNISGSIEIVKQGCWLDDINCYDRTDCVEKKDSPEVYFCCCEGNMCNERFTHLPEAGGPEVTYEPPPTAPT

SEQ ID NO: 1273 - protein, 114 aa, synthetic construct
RGEAETRECIYYNANWELERTQQSGLERCYGDKDKRRHCFATWKNISGSIEIVKQGCWLDDINCYDRTDCVEKKDSPEVYFCCCEGNMCNERFTHLPEAGGPEVTYEPPPTAPT

SEQ ID NO: 1274 - protein, 115 aa, synthetic construct
GRGEAETRECIYYNANWELERTQQSGLERCYGDKDKRRHCFATWKNISGSIEIVKQGCWLDDINCYDRTDCVEKKDSPEVYFCCCEGNMCNERFTHLPEAGGPEVTYEPPPTAPT

SEQ ID NO: 1275 - protein, 116 aa, synthetic construct
SGRGEAETRECIYYNANWELERTQQSGLERCYGDKDKRRHCFATWKNISGSIEIVKQGCWLDDINCYDRTDCVEKKDSPEVYFCCCEGNMCNERFTHLPEAGGPEVTYEPPPTAPT

SEQ ID NO: 1276 - protein, 111 aa, synthetic construct
AETRECIYYNANWELERTQQSGLERCEGEQDKRLHCFATWKNISGSIEIVKQGCWLDDINCYDRTDCVEKKDSPEVYFCCCEGNFCNERFTHLPEAGGPEVTYEPPPTAPT

SEQ ID NO: 1277 - protein, 112 aa, synthetic construct
EAETRECIYYNANWELERTQQSGLERCEGEQDKRLHCFATWKNISGSIEIVKQGCWLDDINCYDRTDCVEKKDSPEVYFCCCEGNFCNERFTHLPEAGGPEVTYEPPPTAPT

SEQ ID NO: 1278 - protein, 113 aa, synthetic construct
GEAETRECIYYNANWELERTQQSGLERCEGEQDKRLHCFATWKNISGSIEIVKQGCWLDDINCYDRTDCVEKKDSPEVYFCCCEGNFCNERFTHLPEAGGPEVTYEPPPTAPT

SEQ ID NO: 1279 - protein, 114 aa, synthetic construct
RGEAETRECIYYNANWELERTQQSGLERCEGEQDKRLHCFATWKNISGSIEIVKQGCWLDDINCYDRTDCVEKKDSPEVYFCCCEGNFCNERFTHLPEAGGPEVTYEPPPTAPT

SEQ ID NO: 1280 - protein, 115 aa, synthetic construct
GRGEAETRECIYYNANWELERTQQSGLERCEGEQDKRLHCFATWKNISGSIEIVKQGCWLDDINCYDRTDCVEKKDSPEVYFCCCEGNFCNERFTHLPEAGGPEVTYEPPPTAPT

SEQ ID NO: 1281 - protein, 116 aa, synthetic construct
SGRGEAETRECIYYNANWELERTQQSGLERCEGEQDKRLHCFATWKNISGSIEIVKQGCWLDDINCYDRTDCVEKKDSPEVYFCCCEGNFCNERFTHLPEAGGPEVTYEPPPTAPT

SEQ ID NO: 1282 - protein, 111 aa, synthetic construct
AETRECIYYNANWELERTQQSGLERCEGEQDKRLHCFATWKNISGSIEIVKQGCWLDDINCYDRTDCVATEENPQVYFCCCEGNFCNERFTHLPEAGGPEVTYEPPPTAPT

SEQ ID NO: 1283 - protein, 112 aa, synthetic construct
EAETRECIYYNANWELERTQQSGLERCEGEQDKRLHCFATWKNISGSIEIVKQGCWLDDINCYDRTDCVATEENPQVYFCCCEGNFCNERFTHLPEAGGPEVTYEPPPTAPT

SEQ ID NO: 1284 - protein, 113 aa, synthetic construct
GEAETRECIYYNANWELERTQQSGLERCEGEQDKRLHCFATWKNISGSIEIVKQGCWLDDINCYDRTDCVATEENPQVYFCCCEGNFCNERFTHLPEAGGPEVTYEPPPTAPT

SEQ ID NO: 1285 - protein, 114 aa, synthetic construct
RGEAETRECIYYNANWELERTQQSGLERCEGEQDKRLHCFATWKNISGSIEIVKQGCWLDDINCYDRTDCVATEENPQVYFCCCEGNFCNERFTHLPEAGGPEVTYEPPPTAPT

SEQ ID NO: 1286 - protein, 115 aa, synthetic construct
GRGEAETRECIYYNANWELERTQQSGLERCEGEQDKRLHCFATWKNISGSIEIVKQGCWLDDINCYDRTDCVATEENPQVYFCCCEGNFCNERFTHLPEAGGPEVTYEPPPTAPT

SEQ ID NO: 1287 - protein, 116 aa, synthetic construct
SGRGEAETRECIYYNANWELERTQQSGLERCEGEQDKRLHCFATWKNISGSIEIVKQGCWLDDINCYDRTDCVATEENPQVYFCCCEGNFCNERFTHLPEAGGPEVTYEPPPTAPT

SEQ ID NO: 1288 - protein, 111 aa, synthetic construct
AETRECIYYNANWELERTQQSGLERCEGEQDKRLHCFATWKNISGSIEIVKQGCWLDDFNCYDRTDCVATEENPQVYFCCCEGNFCNERFTHLPEAGGPEVTYEPPPTAPT

SEQ ID NO: 1289 - protein, 112 aa, synthetic construct
EAETRECIYYNANWELERTQQSGLERCEGEQDKRLHCFATWKNISGSIEIVKQGCWLDDFNCYDRTDCVATEENPQVYFCCCEGNFCNERFTHLPEAGGPEVTYEPPPTAPT

SEQ ID NO: 1290 - protein, 113 aa, synthetic construct
GEAETRECIYYNANWELERTQQSGLERCEGEQDKRLHCFATWKNISGSIEIVKQGCWLDDFNCYDRTDCVATEENPQVYFCCCEGNFCNERFTHLPEAGGPEVTYEPPPTAPT

SEQ ID NO: 1291 - protein, 114 aa, synthetic construct
RGEAETRECIYYNANWELERTQQSGLERCEGEQDKRLHCFATWKNISGSIEIVKQGCWLDDFNCYDRTDCVATEENPQVYFCCCEGNFCNERFTHLPEAGGPEVTYEPPPTAPT

SEQ ID NO: 1292 - protein, 115 aa, synthetic construct
GRGEAETRECIYYNANWELERTQQSGLERCEGEQDKRLHCFATWKNISGSIEIVKQGCWLDDFNCYDRTDCVATEENPQVYFCCCEGNFCNERFTHLPEAGGPEVTYEPPPTAPT

SEQ ID NO: 1293 - protein, 116 aa, synthetic construct
SGRGEAETRECIYYNANWELERTQQSGLERCEGEQDKRLHCFATWKNISGSIEIVKQGCWLDDFNCYDRTDCVATEENPQVYFCCCEGNFCNERFTHLPEAGGPEVTYEPPPTAPT

SEQ ID NO: 1294 - protein, 111 aa, synthetic construct
AETRECIYYNANWELERTQQSGLERCEGEQDKRLHCFATWKNISGSIEIVKQGCWLDDFNCYDRQECVATEENPQVYFCCCEGNFCNERFTHLPEAGGPEVTYEPPPTAPT

SEQ ID NO: 1295 - protein, 112 aa, synthetic construct
EAETRECIYYNANWELERTQQSGLERCEGEQDKRLHCFATWKNISGSIEIVKQGCWLDDFNCYDRQECVATEENPQVYFCCCEGNFCNERFTHLPEAGGPEVTYEPPPTAPT

SEQ ID NO: 1296 - protein, 113 aa, synthetic construct
GEAETRECIYYNANWELERTQQSGLERCEGEQDKRLHCFATWKNISGSIEIVKQGCWLDDFNCYDRQECVATEENPQVYFCCCEGNFCNERFTHLPEAGGPEVTYEPPPTAPT

SEQ ID NO: 1297 - protein, 114 aa, synthetic construct
RGEAETRECIYYNANWELERTQQSGLERCEGEQDKRLHCFATWKNISGSIEIVKQGCWLDDFNCYDRQECVATEENPQVYFCCCEGNFCNERFTHLPEAGGPEVTYEPPPTAPT

SEQ ID NO: 1298 - protein, 115 aa, synthetic construct
GRGEAETRECIYYNANWELERTQQSGLERCEGEQDKRLHCFATWKNISGSIEIVKQGCWLDDFNCYDRQECVATEENPQVYFCCCEGNFCNERFTHLPEAGGPEVTYEPPPTAPT

SEQ ID NO: 1299 - protein, 116 aa, synthetic construct
SGRGEAETRECIYYNANWELERTQQSGLERCEGEQDKRLHCFATWKNISGSIEIVKQGCWLDDFNCYDRQECVATEENPQVYFCCCEGNFCNERFTHLPEAGGPEVTYEPPPTAPT

SEQ ID NO: 1300 - protein, 111 aa, synthetic construct
AETQECIYYNANWELERTQQSGLERCYGDKDKRRHCYASWRNSSGTIELVKKGCWLDDINCYDRTDCVEKKDSPEVYFCCCEGNFCNERFTHLPEAGGPEVTYEPPPTAPT

SEQ ID NO: 1301 - protein, 112 aa, synthetic construct
EAETQECIYYNANWELERTQQSGLERCYGDKDKRRHCYASWRNSSGTIELVKKGCWLDDINCYDRTDCVEKKDSPEVYFCCCEGNFCNERFTHLPEAGGPEVTYEPPPTAPT

SEQ ID NO: 1302 - protein, 113 aa, synthetic construct
GEAETQECIYYNANWELERTQQSGLERCYGDKDKRRHCYASWRNSSGTIELVKKGCWLDDINCYDRTDCVEKKDSPEVYFCCCEGNFCNERFTHLPEAGGPEVTYEPPPTAPT

SEQ ID NO: 1303 - protein, 114 aa, synthetic construct
RGEAETQECIYYNANWELERTQQSGLERCYGDKDKRRHCYASWRNSSGTIELVKKGCWLDDINCYDRTDCVEKKDSPEVYFCCCEGNFCNERFTHLPEAGGPEVTYEPPPTAPT

SEQ ID NO: 1304 - protein, 115 aa, synthetic construct
GRGEAETQECIYYNANWELERTQQSGLERCYGDKDKRRHCYASWRNSSGTIELVKKGCWLDDINCYDRTDCVEKKDSPEVYFCCCEGNFCNERFTHLPEAGGPEVTYEPPPTAPT

SEQ ID NO: 1305 - protein, 116 aa, synthetic construct
SGRGEAETQECIYYNANWELERTQQSGLERCYGDKDKRRHCYASWRNSSGTIELVKKGCWLDDINCYDRTDCVEKKDSPEVYFCCCEGNFCNERFTHLPEAGGPEVTYEPPPTAPT

SEQ ID NO: 1306 - protein, 111 aa, synthetic construct
AETQECIYYNANWELERTQQSGLERCYGDKDKRRHCYASWRNSSGTIELVKKGCWLDDINCYDRTDCVEKKDSPEVYFCCCEGNMCNERFTHLPEAGGPEVTYEPPPTAPT

SEQ ID NO: 1307 - protein, 112 aa, synthetic construct
EAETQECIYYNANWELERTQQSGLERCYGDKDKRRHCYASWRNSSGTIELVKKGCWLDDINCYDRTDCVEKKDSPEVYFCCCEGNMCNERFTHLPEAGGPEVTYEPPPTAPT

SEQ ID NO: 1308 - protein, 113 aa, synthetic construct
GEAETQECIYYNANWELERTQQSGLERCYGDKDKRRHCYASWRNSSGTIELVKKGCWLDDINCYDRTDCVEKKDSPEVYFCCCEGNMCNERFTHLPEAGGPEVTYEPPPTAPT

SEQ ID NO: 1309 - protein, 114 aa, synthetic construct
RGEAETQECIYYNANWELERTQQSGLERCYGDKDKRRHCYASWRNSSGTIELVKKGCWLDDINCYDRTDCVEKKDSPEVYFCCCEGNMCNERFTHLPEAGGPEVTYEPPPTAPT

SEQ ID NO: 1310 - protein, 115 aa, synthetic construct
GRGEAETQECIYYNANWELERTQQSGLERCYGDKDKRRHCYASWRNSSGTIELVKKGCWLDDINCYDRTDCVEKKDSPEVYFCCCEGNMCNERFTHLPEAGGPEVTYEPPPTAPT

SEQ ID NO: 1311 - protein, 116 aa, synthetic construct
SGRGEAETQECIYYNANWELERTQQSGLERCYGDKDKRRHCYASWRNSSGTIELVKKGCWLDDINCYDRTDCVEKKDSPEVYFCCCEGNMCNERFTHLPEAGGPEVTYEPPPTAPT

SEQ ID NO: 1312 - protein, 111 aa, synthetic construct
AETQECIYYNANWELERTQQSGLERCYGDKDKRRHCFATWKNISGSIEIVKQGCWLDDINCYDRTDCVEKKDSPEVYFCCCEGNMCNERFTHLPEAGGPEVTYEPPPTAPT

SEQ ID NO: 1313 - protein, 112 aa, synthetic construct
EAETQECIYYNANWELERTQQSGLERCYGDKDKRRHCFATWKNISGSIEIVKQGCWLDDINCYDRTDCVEKKDSPEVYFCCCEGNMCNERFTHLPEAGGPEVTYEPPPTAPT

SEQ ID NO: 1314 - protein, 113 aa, synthetic construct
GEAETQECIYYNANWELERTQQSGLERCYGDKDKRRHCFATWKNISGSIEIVKQGCWLDDINCYDRTDCVEKKDSPEVYFCCCEGNMCNERFTHLPEAGGPEVTYEPPPTAPT

SEQ ID NO: 1315 - protein, 114 aa, synthetic construct
RGEAETQECIYYNANWELERTQQSGLERCYGDKDKRRHCFATWKNISGSIEIVKQGCWLDDINCYDRTDCVEKKDSPEVYFCCCEGNMCNERFTHLPEAGGPEVTYEPPPTAPT

SEQ ID NO: 1316 - protein, 115 aa, synthetic construct
GRGEAETQECIYYNANWELERTQQSGLERCYGDKDKRRHCFATWKNISGSIEIVKQGCWLDDINCYDRTDCVEKKDSPEVYFCCCEGNMCNERFTHLPEAGGPEVTYEPPPTAPT

SEQ ID NO: 1317 - protein, 116 aa, synthetic construct
SGRGEAETQECIYYNANWELERTQQSGLERCYGDKDKRRHCFATWKNISGSIEIVKQGCWLDDINCYDRTDCVEKKDSPEVYFCCCEGNMCNERFTHLPEAGGPEVTYEPPPTAPT

SEQ ID NO: 1318 - protein, 111 aa, synthetic construct
AETQECIYYNANWELERTQQSGLERCYGDKDKRRHCFATWKNISGSIEIVKQGCWLDDINCYDRTDCVEKKDSPEVYFCCCEGNFCNERFTHLPEAGGPEVTYEPPPTAPT

SEQ ID NO: 1319 - protein, 112 aa, synthetic construct
EAETQECIYYNANWELERTQQSGLERCYGDKDKRRHCFATWKNISGSIEIVKQGCWLDDINCYDRTDCVEKKDSPEVYFCCCEGNFCNERFTHLPEAGGPEVTYEPPPTAPT

SEQ ID NO: 1320 - protein, 113 aa, synthetic construct
GEAETQECIYYNANWELERTQQSGLERCYGDKDKRRHCFATWKNISGSIEIVKQGCWLDDINCYDRTDCVEKKDSPEVYFCCCEGNFCNERFTHLPEAGGPEVTYEPPPTAPT

SEQ ID NO: 1321 - protein, 114 aa, synthetic construct
RGEAETQECIYYNANWELERTQQSGLERCYGDKDKRRHCFATWKNISGSIEIVKQGCWLDDINCYDRTDCVEKKDSPEVYFCCCEGNFCNERFTHLPEAGGPEVTYEPPPTAPT

SEQ ID NO: 1322 - protein, 115 aa, synthetic construct
GRGEAETQECIYYNANWELERTQQSGLERCYGDKDKRRHCFATWKNISGSIEIVKQGCWLDDINCYDRTDCVEKKDSPEVYFCCCEGNFCNERFTHLPEAGGPEVTYEPPPTAPT

SEQ ID NO: 1323 - protein, 116 aa, synthetic construct
SGRGEAETQECIYYNANWELERTQQSGLERCYGDKDKRRHCFATWKNISGSIEIVKQGCWLDDINCYDRTDCVEKKDSPEVYFCCCEGNFCNERFTHLPEAGGPEVTYEPPPTAPT

SEQ ID NO: 1324 - protein, 111 aa, synthetic construct
AETRECLFFNANWEKDRTQQTGVEPCEGEQDKRLHCFATWKNISGSIEIVKQGCWLDDINCYDRTDCVEKKDSPEVYFCCCEGNFCNERFTHLPEAGGPEVTYEPPPTAPT

SEQ ID NO: 1325 - protein, 112 aa, synthetic construct
EAETRECLFFNANWEKDRTQQTGVEPCEGEQDKRLHCFATWKNISGSIEIVKQGCWLDDINCYDRTDCVEKKDSPEVYFCCCEGNFCNERFTHLPEAGGPEVTYEPPPTAPT

SEQ ID NO: 1326 - protein, 113 aa, synthetic construct
GEAETRECLFFNANWEKDRTQQTGVEPCEGEQDKRLHCFATWKNISGSIEIVKQGCWLDDINCYDRTDCVEKKDSPEVYFCCCEGNFCNERFTHLPEAGGPEVTYEPPPTAPT

SEQ ID NO: 1327 - protein, 114 aa, synthetic construct
RGEAETRECLFFNANWEKDRTQQTGVEPCEGEQDKRLHCFATWKNISGSIEIVKQGCWLDDINCYDRTDCVEKKDSPEVYFCCCEGNFCNERFTHLPEAGGPEVTYEPPPTAPT

SEQ ID NO: 1328 - protein, 115 aa, synthetic construct
GRGEAETRECLFFNANWEKDRTQQTGVEPCEGEQDKRLHCFATWKNISGSIEIVKQGCWLDDINCYDRTDCVEKKDSPEVYFCCCEGNFCNERFTHLPEAGGPEVTYEPPPTAPT

SEQ ID NO: 1329 - protein, 116 aa, synthetic construct
SGRGEAETRECLFFNANWEKDRTQQTGVEPCEGEQDKRLHCFATWKNISGSIEIVKQGCWLDDINCYDRTDCVEKKDSPEVYFCCCEGNFCNERFTHLPEAGGPEVTYEPPPTAPT

SEQ ID NO: 1330 - protein, 111 aa, synthetic construct
AETRECLFFNANWEKDRTQQSGVEPCEGEQDKRLHCYASWRNSSGTIELVKKGCWLDDINCYDRTDCVEKKDSPEVYFCCCEGNFCNERFTHLPEAGGPEVTYEPPPTAPT

SEQ ID NO: 1331 - protein, 112 aa, synthetic construct
EAETRECLFFNANWEKDRTQQSGVEPCEGEQDKRLHCYASWRNSSGTIELVKKGCWLDDINCYDRTDCVEKKDSPEVYFCCCEGNFCNERFTHLPEAGGPEVTYEPPPTAPT

SEQ ID NO: 1332 - protein, 113 aa, synthetic construct
GEAETRECLFFNANWEKDRTQQSGVEPCEGEQDKRLHCYASWRNSSGTIELVKKGCWLDDINCYDRTDCVEKKDSPEVYFCCCEGNFCNERFTHLPEAGGPEVTYEPPPTAPT

SEQ ID NO: 1333 - protein, 114 aa, synthetic construct
RGEAETRECLFFNANWEKDRTQQSGVEPCEGEQDKRLHCYASWRNSSGTIELVKKGCWLDDINCYDRTDCVEKKDSPEVYFCCCEGNFCNERFTHLPEAGGPEVTYEPPPTAPT

SEQ ID NO: 1334 - protein, 115 aa, synthetic construct
GRGEAETRECLFFNANWEKDRTQQSGVEPCEGEQDKRLHCYASWRNSSGTIELVKKGCWLDDINCYDRTDCVEKKDSPEVYFCCCEGNFCNERFTHLPEAGGPEVTYEPPPTAPT

SEQ ID NO: 1335 - protein, 116 aa, synthetic construct
SGRGEAETRECLFFNANWEKDRTQQSGVEPCEGEQDKRLHCYASWRNSSGTIELVKKGCWLDDINCYDRTDCVEKKDSPEVYFCCCEGNFCNERFTHLPEAGGPEVTYEPPPTAPT

SEQ ID NO: 1336 - protein, 111 aa, synthetic construct
AETRECLFFNANWEKDRTQQSGVEPCYGDKDKRRHCYASWRNSSGTIELVKKGCWLDDINCYDRTDCVEKKDSPEVYFCCCEGNFCNERFTHLPEAGGPEVTYEPPPTAPT

SEQ ID NO: 1337 - protein, 112 aa, synthetic construct
EAETRECLFFNANWEKDRTQQSGVEPCYGDKDKRRHCYASWRNSSGTIELVKKGCWLDDINCYDRTDCVEKKDSPEVYFCCCEGNFCNERFTHLPEAGGPEVTYEPPPTAPT

SEQ ID NO: 1338 - protein, 113 aa, synthetic construct
GEAETRECLFFNANWEKDRTQQSGVEPCYGDKDKRRHCYASWRNSSGTIELVKKGCWLDDINCYDRTDCVEKKDSPEVYFCCCEGNFCNERFTHLPEAGGPEVTYEPPPTAPT

SEQ ID NO: 1339 - protein, 114 aa, synthetic construct
RGEAETRECLFFNANWEKDRTQQSGVEPCYGDKDKRRHCYASWRNSSGTIELVKKGCWLDDINCYDRTDCVEKKDSPEVYFCCCEGNFCNERFTHLPEAGGPEVTYEPPPTAPT

SEQ ID NO: 1340 - protein, 115 aa, synthetic construct
GRGEAETRECLFFNANWEKDRTQQSGVEPCYGDKDKRRHCYASWRNSSGTIELVKKGCWLDDINCYDRTDCVEKKDSPEVYFCCCEGNFCNERFTHLPEAGGPEVTYEPPPTAPT

SEQ ID NO: 1341 - protein, 116 aa, synthetic construct
SGRGEAETRECLFFNANWEKDRTQQSGVEPCYGDKDKRRHCYASWRNSSGTIELVKKGCWLDDINCYDRTDCVEKKDSPEVYFCCCEGNFCNERFTHLPEAGGPEVTYEPPPTAPT

SEQ ID NO: 1342 - protein, 111 aa, synthetic construct
AETRECIYYNANWELERTQQSGLERCYGDKDKRRHCYASWRNSSGTIELVKKGCWLDDFNCYDRTDCVATEENPQVYFCCCEGNFCNERFTHLPEAGGPEVTYEPPPTAPT

SEQ ID NO: 1343 - protein, 112 aa, synthetic construct
EAETRECIYYNANWELERTQQSGLERCYGDKDKRRHCYASWRNSSGTIELVKKGCWLDDFNCYDRTDCVATEENPQVYFCCCEGNFCNERFTHLPEAGGPEVTYEPPPTAPT

SEQ ID NO: 1344 - protein, 113 aa, synthetic construct
GEAETRECIYYNANWELERTQQSGLERCYGDKDKRRHCYASWRNSSGTIELVKKGCWLDDFNCYDRTDCVATEENPQVYFCCCEGNFCNERFTHLPEAGGPEVTYEPPPTAPT

SEQ ID NO: 1345 - protein, 114 aa, synthetic construct
RGEAETRECIYYNANWELERTQQSGLERCYGDKDKRRHCYASWRNSSGTIELVKKGCWLDDFNCYDRTDCVATEENPQVYFCCCEGNFCNERFTHLPEAGGPEVTYEPPPTAPT

SEQ ID NO: 1346 - protein, 115 aa, synthetic construct
GRGEAETRECIYYNANWELERTQQSGLERCYGDKDKRRHCYASWRNSSGTIELVKKGCWLDDFNCYDRTDCVATEENPQVYFCCCEGNFCNERFTHLPEAGGPEVTYEPPPTAPT

SEQ ID NO: 1347 - protein, 116 aa, synthetic construct
SGRGEAETRECIYYNANWELERTQQSGLERCYGDKDKRRHCYASWRNSSGTIELVKKGCWLDDFNCYDRTDCVATEENPQVYFCCCEGNFCNERFTHLPEAGGPEVTYEPPPTAPT

SEQ ID NO: 1348 - protein, 111 aa, synthetic construct
AETRECIYYNANWELERTQQSGLERCYGDKDKRRHCYASWRNSSGTIELVKQGCWLDDFNCYDRTDCVATEENPQVYFCCCEGNFCNERFTHLPEAGGPEVTYEPPPTAPT

SEQ ID NO: 1349 - protein, 112 aa, synthetic construct
EAETRECIYYNANWELERTQQSGLERCYGDKDKRRHCYASWRNSSGTIELVKQGCWLDDFNCYDRTDCVATEENPQVYFCCCEGNFCNERFTHLPEAGGPEVTYEPPPTAPT

SEQ ID NO: 1350 - protein, 113 aa, synthetic construct
GEAETRECIYYNANWELERTQQSGLERCYGDKDKRRHCYASWRNSSGTIELVKQGCWLDDFNCYDRTDCVATEENPQVYFCCCEGNFCNERFTHLPEAGGPEVTYEPPPTAPT

SEQ ID NO: 1351 - protein, 114 aa, synthetic construct
RGEAETRECIYYNANWELERTQQSGLERCYGDKDKRRHCYASWRNSSGTIELVKQGCWLDDFNCYDRTDCVATEENPQVYFCCCEGNFCNERFTHLPEAGGPEVTYEPPPTAPT

SEQ ID NO: 1352 - protein, 115 aa, synthetic construct
GRGEAETRECIYYNANWELERTQQSGLERCYGDKDKRRHCYASWRNSSGTIELVKQGCWLDDFNCYDRTDCVATEENPQVYFCCCEGNFCNERFTHLPEAGGPEVTYEPPPTAPT

SEQ ID NO: 1353 - protein, 116 aa, synthetic construct
SGRGEAETRECIYYNANWELERTQQSGLERCYGDKDKRRHCYASWRNSSGTIELVKQGCWLDDFNCYDRTDCVATEENPQVYFCCCEGNFCNERFTHLPEAGGPEVTYEPPPTAPT

SEQ ID NO: 1354 - protein, 111 aa, synthetic construct
AETRECIYYNANWELERTQQSGLERCYGDKDKRRHCYASWRNSSGTIEIVKKGCWLDDFNCYDRTDCVATEENPQVYFCCCEGNFCNERFTHLPEAGGPEVTYEPPPTAPT

SEQ ID NO: 1355 - protein, 112 aa, synthetic construct
EAETRECIYYNANWELERTQQSGLERCYGDKDKRRHCYASWRNSSGTIEIVKKGCWLDDFNCYDRTDCVATEENPQVYFCCCEGNFCNERFTHLPEAGGPEVTYEPPPTAPT

SEQ ID NO: 1356 - protein, 113 aa, synthetic construct
GEAETRECIYYNANWELERTQQSGLERCYGDKDKRRHCYASWRNSSGTIEIVKKGCWLDDFNCYDRTDCVATEENPQVYFCCCEGNFCNERFTHLPEAGGPEVTYEPPPTAPT

SEQ ID NO: 1357 - protein, 114 aa, synthetic construct
RGEAETRECIYYNANWELERTQQSGLERCYGDKDKRRHCYASWRNSSGTIEIVKKGCWLDDFNCYDRTDCVATEENPQVYFCCCEGNFCNERFTHLPEAGGPEVTYEPPPTAPT

SEQ ID NO: 1358 - protein, 115 aa, synthetic construct
GRGEAETRECIYYNANWELERTQQSGLERCYGDKDKRRHCYASWRNSSGTIEIVKKGCWLDDFNCYDRTDCVATEENPQVYFCCCEGNFCNERFTHLPEAGGPEVTYEPPPTAPT

SEQ ID NO: 1359 - protein, 116 aa, synthetic construct
SGRGEAETRECIYYNANWELERTQQSGLERCYGDKDKRRHCYASWRNSSGTIEIVKKGCWLDDFNCYDRTDCVATEENPQVYFCCCEGNFCNERFTHLPEAGGPEVTYEPPPTAPT

SEQ ID NO: 1360 - protein, 111 aa, synthetic construct
AETRECIYYNANWELERTQQSGLERCYGDKDKRRHCYASWRNSSGSIELVKKGCWLDDFNCYDRTDCVATEENPQVYFCCCEGNFCNERFTHLPEAGGPEVTYEPPPTAPT

SEQ ID NO: 1361 - protein, 112 aa, synthetic construct
EAETRECIYYNANWELERTQQSGLERCYGDKDKRRHCYASWRNSSGSIELVKKGCWLDDFNCYDRTDCVATEENPQVYFCCCEGNFCNERFTHLPEAGGPEVTYEPPPTAPT

SEQ ID NO: 1362 - protein, 113 aa, synthetic construct
GEAETRECIYYNANWELERTQQSGLERCYGDKDKRRHCYASWRNSSGSIELVKKGCWLDDFNCYDRTDCVATEENPQVYFCCCEGNFCNERFTHLPEAGGPEVTYEPPPTAPT

SEQ ID NO: 1363 - protein, 114 aa, synthetic construct
RGEAETRECIYYNANWELERTQQSGLERCYGDKDKRRHCYASWRNSSGSIELVKKGCWLDDFNCYDRTDCVATEENPQVYFCCCEGNFCNERFTHLPEAGGPEVTYEPPPTAPT

SEQ ID NO: 1364 - protein, 115 aa, synthetic construct
GRGEAETRECIYYNANWELERTQQSGLERCYGDKDKRRHCYASWRNSSGSIELVKKGCWLDDFNCYDRTDCVATEENPQVYFCCCEGNFCNERFTHLPEAGGPEVTYEPPPTAPT

SEQ ID NO: 1365 - protein, 116 aa, synthetic construct
SGRGEAETRECIYYNANWELERTQQSGLERCYGDKDKRRHCYASWRNSSGSIELVKKGCWLDDFNCYDRTDCVATEENPQVYFCCCEGNFCNERFTHLPEAGGPEVTYEPPPTAPT

SEQ ID NO: 1366 - protein, 111 aa, synthetic construct
AETRECIYYNANWELERTQQSGLERCYGDKDKRRHCYASWRNSSGSIEIVKKGCWLDDFNCYDRTDCVATEENPQVYFCCCEGNFCNERFTHLPEAGGPEVTYEPPPTAPT

SEQ ID NO: 1367 - protein, 112 aa, synthetic construct
EAETRECIYYNANWELERTQQSGLERCYGDKDKRRHCYASWRNSSGSIEIVKKGCWLDDFNCYDRTDCVATEENPQVYFCCCEGNFCNERFTHLPEAGGPEVTYEPPPTAPT

SEQ ID NO: 1368 - protein, 113 aa, synthetic construct
GEAETRECIYYNANWELERTQQSGLERCYGDKDKRRHCYASWRNSSGSIEIVKKGCWLDDFNCYDRTDCVATEENPQVYFCCCEGNFCNERFTHLPEAGGPEVTYEPPPTAPT

SEQ ID NO: 1369 - protein, 114 aa, synthetic construct
RGEAETRECIYYNANWELERTQQSGLERCYGDKDKRRHCYASWRNSSGSIEIVKKGCWLDDFNCYDRTDCVATEENPQVYFCCCEGNFCNERFTHLPEAGGPEVTYEPPPTAPT

SEQ ID NO: 1370 - protein, 115 aa, synthetic construct
GRGEAETRECIYYNANWELERTQQSGLERCYGDKDKRRHCYASWRNSSGSIEIVKKGCWLDDFNCYDRTDCVATEENPQVYFCCCEGNFCNERFTHLPEAGGPEVTYEPPPTAPT

SEQ ID NO: 1371 - protein, 116 aa, synthetic construct
SGRGEAETRECIYYNANWELERTQQSGLERCYGDKDKRRHCYASWRNSSGSIEIVKKGCWLDDFNCYDRTDCVATEENPQVYFCCCEGNFCNERFTHLPEAGGPEVTYEPPPTAPT

SEQ ID NO: 1372 - protein, 111 aa, synthetic construct
AETRECIYYNANWELERTQQSGLERCYGDKDKRRHCYASWRNSSGSIEIVKQGCWLDDFNCYDRTDCVATEENPQVYFCCCEGNFCNERFTHLPEAGGPEVTYEPPPTAPT

SEQ ID NO: 1373 - protein, 112 aa, synthetic construct
EAETRECIYYNANWELERTQQSGLERCYGDKDKRRHCYASWRNSSGSIEIVKQGCWLDDFNCYDRTDCVATEENPQVYFCCCEGNFCNERFTHLPEAGGPEVTYEPPPTAPT

SEQ ID NO: 1374 - protein, 113 aa, synthetic construct
GEAETRECIYYNANWELERTQQSGLERCYGDKDKRRHCYASWRNSSGSIEIVKQGCWLDDFNCYDRTDCVATEENPQVYFCCCEGNFCNERFTHLPEAGGPEVTYEPPPTAPT

SEQ ID NO: 1375 - protein, 114 aa, synthetic construct
RGEAETRECIYYNANWELERTQQSGLERCYGDKDKRRHCYASWRNSSGSIEIVKQGCWLDDFNCYDRTDCVATEENPQVYFCCCEGNFCNERFTHLPEAGGPEVTYEPPPTAPT

SEQ ID NO: 1376 - protein, 115 aa, synthetic construct
GRGEAETRECIYYNANWELERTQQSGLERCYGDKDKRRHCYASWRNSSGSIEIVKQGCWLDDFNCYDRTDCVATEENPQVYFCCCEGNFCNERFTHLPEAGGPEVTYEPPPTAPT

SEQ ID NO: 1377 - protein, 116 aa, synthetic construct
SGRGEAETRECIYYNANWELERTQQSGLERCYGDKDKRRHCYASWRNSSGSIEIVKQGCWLDDFNCYDRTDCVATEENPQVYFCCCEGNFCNERFTHLPEAGGPEVTYEPPPTAPT

SEQ ID NO: 1378 - protein, 111 aa, synthetic construct; identical to SEQ ID NO: 1192

SEQ ID NO: 1379 - protein, 112 aa, synthetic construct; identical to SEQ ID NO: 1193

SEQ ID NO: 1380 - protein, 113 aa, synthetic construct; identical to SEQ ID NO: 1194

SEQ ID NO: 1381 - protein, 114 aa, synthetic construct; identical to SEQ ID NO: 1195

SEQ ID NO: 1382 - protein, 115 aa, synthetic construct; identical to SEQ ID NO: 1196

SEQ ID NO: 1383 - protein, 116 aa, synthetic construct; identical to SEQ ID NO: 1197

SEQ ID NO: 1384 - protein, 111 aa, synthetic construct
AETRECIYYNANWELERTQQSGLERCEGEQDKRLHCYASWRNSSGTIELVKKGCWLDDFNCYDRQECVATEENPQVYFCCCEGNFCNEKFSYFPEMEVTQPTSNPVTPKPP

SEQ ID NO: 1385 - protein, 112 aa, synthetic construct
EAETRECIYYNANWELERTQQSGLERCEGEQDKRLHCYASWRNSSGTIELVKKGCWLDDFNCYDRQECVATEENPQVYFCCCEGNFCNEKFSYFPEMEVTQPTSNPVTPKPP

SEQ ID NO: 1386 - protein, 113 aa, synthetic construct
GEAETRECIYYNANWELERTQQSGLERCEGEQDKRLHCYASWRNSSGTIELVKKGCWLDDFNCYDRQECVATEENPQVYFCCCEGNFCNEKFSYFPEMEVTQPTSNPVTPKPP

SEQ ID NO: 1387 - protein, 114 aa, synthetic construct
RGEAETRECIYYNANWELERTQQSGLERCEGEQDKRLHCYASWRNSSGTIELVKKGCWLDDFNCYDRQECVATEENPQVYFCCCEGNFCNEKFSYFPEMEVTQPTSNPVTPKPP

SEQ ID NO: 1388 - protein, 115 aa, synthetic construct
GRGEAETRECIYYNANWELERTQQSGLERCEGEQDKRLHCYASWRNSSGTIELVKKGCWLDDFNCYDRQECVATEENPQVYFCCCEGNFCNEKFSYFPEMEVTQPTSNPVTPKPP

SEQ ID NO: 1389 - protein, 116 aa, synthetic construct
SGRGEAETRECIYYNANWELERTQQSGLERCEGEQDKRLHCYASWRNSSGTIELVKKGCWLDDFNCYDRQECVATEENPQVYFCCCEGNFCNEKFSYFPEMEVTQPTSNPVTPKPP

SEQ ID NO: 1390 - protein, 111 aa, synthetic construct
AETRECIYYNANWELERTQQSGLERCEGEQDKRLHCYASWRNSSGTIELVKKGCWLDDFNCYDRQECVATEENPQVYFCCCEGNFCNEKFSYFPQMEVTQPTSNPVTPKPP

SEQ ID NO: 1391 - protein, 112 aa, synthetic construct
EAETRECIYYNANWELERTQQSGLERCEGEQDKRLHCYASWRNSSGTIELVKKGCWLDDFNCYDRQECVATEENPQVYFCCCEGNFCNEKFSYFPQMEVTQPTSNPVTPKPP

SEQ ID NO: 1392 - protein, 113 aa, synthetic construct
GEAETRECIYYNANWELERTQQSGLERCEGEQDKRLHCYASWRNSSGTIELVKKGCWLDDFNCYDRQECVATEENPQVYFCCCEGNFCNEKFSYFPQMEVTQPTSNPVTPKPP

SEQ ID NO: 1393 - protein, 114 aa, synthetic construct
RGEAETRECIYYNANWELERTQQSGLERCEGEQDKRLHCYASWRNSSGTIELVKKGCWLDDFNCYDRQECVATEENPQVYFCCCEGNFCNEKFSYFPQMEVTQPTSNPVTPKPP

SEQ ID NO: 1394 - protein, 115 aa, synthetic construct
GRGEAETRECIYYNANWELERTQQSGLERCEGEQDKRLHCYASWRNSSGTIELVKKGCWLDDFNCYDRQECVATEENPQVYFCCCEGNFCNEKFSYFPQMEVTQPTSNPVTPKPP

SEQ ID NO: 1395 - protein, 116 aa, synthetic construct
SGRGEAETRECIYYNANWELERTQQSGLERCEGEQDKRLHCYASWRNSSGTIELVKKGCWLDDFNCYDRQECVATEENPQVYFCCCEGNFCNEKFSYFPQMEVTQPTSNPVTPKPP

SEQ ID NO: 1396 - protein, 111 aa, synthetic construct
AETRECIYYNANWELERTQQSGLERCYGDKDKRRHCYASWRNSSGTIELVKKGCWLDDINCYDRTDCVEKKDSPEVYFCCCEGNFCNEKFSYFPEMEVTQPTSNPVTPKPP

SEQ ID NO: 1397 - protein, 112 aa, synthetic construct
EAETRECIYYNANWELERTQQSGLERCYGDKDKRRHCYASWRNSSGTIELVKKGCWLDDINCYDRTDCVEKKDSPEVYFCCCEGNFCNEKFSYFPEMEVTQPTSNPVTPKPP

SEQ ID NO: 1398 - protein, 113 aa, synthetic construct
GEAETRECIYYNANWELERTQQSGLERCYGDKDKRRHCYASWRNSSGTIELVKKGCWLDDINCYDRTDCVEKKDSPEVYFCCCEGNFCNEKFSYFPEMEVTQPTSNPVTPKPP

SEQ ID NO: 1399 - protein, 114 aa, synthetic construct
RGEAETRECIYYNANWELERTQQSGLERCYGDKDKRRHCYASWRNSSGTIELVKKGCWLDDINCYDRTDCVEKKDSPEVYFCCCEGNFCNEKFSYFPEMEVTQPTSNPVTPKPP

SEQ ID NO: 1400 - protein, 115 aa, synthetic construct
GRGEAETRECIYYNANWELERTQQSGLERCYGDKDKRRHCYASWRNSSGTIELVKKGCWLDDINCYDRTDCVEKKDSPEVYFCCCEGNFCNEKFSYFPEMEVTQPTSNPVTPKPP

SEQ ID NO: 1401 - protein, 116 aa, synthetic construct
SGRGEAETRECIYYNANWELERTQQSGLERCYGDKDKRRHCYASWRNSSGTIELVKKGCWLDDINCYDRTDCVEKKDSPEVYFCCCEGNFCNEKFSYFPEMEVTQPTSNPVTPKPP

SEQ ID NO: 1402 - protein, 111 aa, synthetic construct
AETRECIYYNANWELERTQQSGLERCYGDKDKRRHCYASWRNSSGTIELVKKGCWLDDINCYDRTDCVEKKDSPEVYFCCCEGNFCNEKFSYFPQMEVTQPTSNPVTPKPP

SEQ ID NO: 1403 - protein, 112 aa, synthetic construct
EAETRECIYYNANWELERTQQSGLERCYGDKDKRRHCYASWRNSSGTIELVKKGCWLDDINCYDRTDCVEKKDSPEVYFCCCEGNFCNEKFSYFPQMEVTQPTSNPVTPKPP

SEQ ID NO: 1404 - protein, 113 aa, synthetic construct
GEAETRECIYYNANWELERTQQSGLERCYGDKDKRRHCYASWRNSSGTIELVKKGCWLDDINCYDRTDCVEKKDSPEVYFCCCEGNFCNEKFSYFPQMEVTQPTSNPVTPKPP

SEQ ID NO: 1405 - protein, 114 aa, synthetic construct
RGEAETRECIYYNANWELERTQQSGLERCYGDKDKRRHCYASWRNSSGTIELVKKGCWLDDINCYDRTDCVEKKDSPEVYFCCCEGNFCNEKFSYFPQMEVTQPTSNPVTPKPP

SEQ ID NO: 1406 - protein, 115 aa, synthetic construct
GRGEAETRECIYYNANWELERTQQSGLERCYGDKDKRRHCYASWRNSSGTIELVKKGCWLDDINCYDRTDCVEKKDSPEVYFCCCEGNFCNEKFSYFPQMEVTQPTSNPVTPKPP

SEQ ID NO: 1407 - protein, 116 aa, synthetic construct
SGRGEAETRECIYYNANWELERTQQSGLERCYGDKDKRRHCYASWRNSSGTIELVKKGCWLDDINCYDRTDCVEKKDSPEVYFCCCEGNFCNEKFSYFPQMEVTQPTSNPVTPKPP

SEQ ID NO: 1408 - protein, 111 aa, synthetic construct
AETRECIYYNANWELERTQQSGLERCYGDKDKRRHCYASWRNSSGTIELVKKGCWLDDFNCYDRQECVATEENPQVYFCCCEGNFCNEKFSYFPQMEVTQPTSNPVTPKPP

SEQ ID NO: 1409 - protein, 112 aa, synthetic construct
EAETRECIYYNANWELERTQQSGLERCYGDKDKRRHCYASWRNSSGTIELVKKGCWLDDFNCYDRQECVATEENPQVYFCCCEGNFCNEKFSYFPQMEVTQPTSNPVTPKPP

SEQ ID NO: 1410 - protein, 113 aa, synthetic construct
GEAETRECIYYNANWELERTQQSGLERCYGDKDKRRHCYASWRNSSGTIELVKKGCWLDDFNCYDRQECVATEENPQVYFCCCEGNFCNEKFSYFPQMEVTQPTSNPVTPKPP

SEQ ID NO: 1411 - protein, 114 aa, synthetic construct
RGEAETRECIYYNANWELERTQQSGLERCYGDKDKRRHCYASWRNSSGTIELVKKGCWLDDFNCYDRQECVATEENPQVYFCCCEGNFCNEKFSYFPQMEVTQPTSNPVTPKPP

SEQ ID NO: 1412 - protein, 115 aa, synthetic construct
GRGEAETRECIYYNANWELERTQQSGLERCYGDKDKRRHCYASWRNSSGTIELVKKGCWLDDFNCYDRQECVATEENPQVYFCCCEGNFCNEKFSYFPQMEVTQPTSNPVTPKPP

SEQ ID NO: 1413 - protein, 116 aa, synthetic construct
SGRGEAETRECIYYNANWELERTQQSGLERCYGDKDKRRHCYASWRNSSGTIELVKKGCWLDDFNCYDRQECVATEENPQVYFCCCEGNFCNEKFSYFPQMEVTQPTSNPVTPKPP

SEQ ID NO: 1414 - protein, 111 aa, synthetic construct
AETRECIYYNANWELERTQQSGLERCYGDKDKRRHCYASWRNSSGTIELVKQGCWLDDFNCYDRQECVATEENPQVYFCCCEGNFCNEKFSYFPQMEVTQPTSNPVTPKPP

SEQ ID NO: 1415 - protein, 112 aa, synthetic construct
EAETRECIYYNANWELERTQQSGLERCYGDKDKRRHCYASWRNSSGTIELVKQGCWLDDFNCYDRQECVATEENPQVYFCCCEGNFCNEKFSYFPQMEVTQPTSNPVTPKPP

SEQ ID NO: 1416 - protein, 113 aa, synthetic construct
GEAETRECIYYNANWELERTQQSGLERCYGDKDKRRHCYASWRNSSGTIELVKQGCWLDDFNCYDRQECVATEENPQVYFCCCEGNFCNEKFSYFPQMEVTQPTSNPVTPKPP

SEQ ID NO: 1417 - protein, 114 aa, synthetic construct
RGEAETRECIYYNANWELERTQQSGLERCYGDKDKRRHCYASWRNSSGTIELVKQGCWLDDFNCYDRQECVATEENPQVYFCCCEGNFCNEKFSYFPQMEVTQPTSNPVTPKPP

SEQ ID NO: 1418 - protein, 115 aa, synthetic construct
GRGEAETRECIYYNANWELERTQQSGLERCYGDKDKRRHCYASWRNSSGTIELVKQGCWLDDFNCYDRQECVATEENPQVYFCCCEGNFCNEKFSYFPQMEVTQPTSNPVTPKPP

SEQ ID NO: 1419 - protein, 116 aa, synthetic construct
SGRGEAETRECIYYNANWELERTQQSGLERCYGDKDKRRHCYASWRNSSGTIELVKQGCWLDDFNCYDRQECVATEENPQVYFCCCEGNFCNEKFSYFPQMEVTQPTSNPVTPKPP

SEQ ID NO: 1420 - protein, 111 aa, synthetic construct
AETRECIYYNANWELERTQQSGLERCYGDKDKRRHCYASWRNSSGTIEIVKKGCWLDDFNCYDRQECVATKENPQVYFCCCEGNFCNEKFSYFPQMEVTQPTSNPVTPKPP

SEQ ID NO: 1421 - protein, 112 aa, synthetic construct
EAETRECIYYNANWELERTQQSGLERCYGDKDKRRHCYASWRNSSGTIEIVKKGCWLDDFNCYDRQECVATKENPQVYFCCCEGNFCNEKFSYFPQMEVTQPTSNPVTPKPP

SEQ ID NO: 1422 - protein, 113 aa, synthetic construct
GEAETRECIYYNANWELERTQQSGLERCYGDKDKRRHCYASWRNSSGTIEIVKKGCWLDDFNCYDRQECVATKENPQVYFCCCEGNFCNEKFSYFPQMEVTQPTSNPVTPKPP

SEQ ID NO: 1423 - protein, 114 aa, synthetic construct
RGEAETRECIYYNANWELERTQQSGLERCYGDKDKRRHCYASWRNSSGTIEIVKKGCWLDDFNCYDRQECVATKENPQVYFCCCEGNFCNEKFSYFPQMEVTQPTSNPVTPKPP

SEQ ID NO: 1424 - protein, 115 aa, synthetic construct
GRGEAETRECIYYNANWELERTQQSGLERCYGDKDKRRHCYASWRNSSGTIEIVKKGCWLDDFNCYDRQECVATKENPQVYFCCCEGNFCNEKFSYFPQMEVTQPTSNPVTPKPP

SEQ ID NO: 1425 - protein, 116 aa, synthetic construct
SGRGEAETRECIYYNANWELERTQQSGLERCYGDKDKRRHCYASWRNSSGTIEIVKKGCWLDDFNCYDRQECVATKENPQVYFCCCEGNFCNEKFSYFPQMEVTQPTSNPVTPKPP

SEQ ID NO: 1426 - protein, 111 aa, synthetic construct
AETRECIYYNANWELERTQQSGLERCYGDKDKRRHCYASWRNSSGSIELVKKGCWLDDFNCYDRQECVATKENPQVYFCCCEGNFCNEKFSYFPQMEVTQPTSNPVTPKPP

SEQ ID NO: 1427 - protein, 112 aa, synthetic construct
EAETRECIYYNANWELERTQQSGLERCYGDKDKRRHCYASWRNSSGSIELVKKGCWLDDFNCYDRQECVATKENPQVYFCCCEGNFCNEKFSYFPQMEVTQPTSNPVTPKPP

SEQ ID NO: 1428 - protein, 113 aa, synthetic construct
GEAETRECIYYNANWELERTQQSGLERCYGDKDKRRHCYASWRNSSGSIELVKKGCWLDDFNCYDRQECVATKENPQVYFCCCEGNFCNEKFSYFPQMEVTQPTSNPVTPKPP

SEQ ID NO: 1429 - protein, 114 aa, synthetic construct
RGEAETRECIYYNANWELERTQQSGLERCYGDKDKRRHCYASWRNSSGSIELVKKGCWLDDFNCYDRQECVATKENPQVYFCCCEGNFCNEKFSYFPQMEVTQPTSNPVTPKPP

SEQ ID NO: 1430 - protein, 115 aa, synthetic construct
GRGEAETRECIYYNANWELERTQQSGLERCYGDKDKRRHCYASWRNSSGSIELVKKGCWLDDFNCYDRQECVATKENPQVYFCCCEGNFCNEKFSYFPQMEVTQPTSNPVTPKPP

SEQ ID NO: 1431 - protein, 116 aa, synthetic construct
SGRGEAETRECIYYNANWELERTQQSGLERCYGDKDKRRHCYASWRNSSGSIELVKKGCWLDDFNCYDRQECVATKENPQVYFCCCEGNFCNEKFSYFPQMEVTQPTSNPVTPKPP

SEQ ID NO: 1432 - protein, 111 aa, synthetic construct
AETRECIYYNANWELERTQQSGLERCEGEQDKRLHCYASWRNSSGSIELVKKGCWLDDFNCYDRQECVATEENPQVYFCCCEGNFCNEKFSYFPQMEVTQPTSNPVTPKPP

SEQ ID NO: 1433 - protein, 112 aa, synthetic construct
EAETRECIYYNANWELERTQQSGLERCEGEQDKRLHCYASWRNSSGSIELVKKGCWLDDFNCYDRQECVATEENPQVYFCCCEGNFCNEKFSYFPQMEVTQPTSNPVTPKPP

SEQ ID NO: 1434 - protein, 113 aa, synthetic construct
GEAETRECIYYNANWELERTQQSGLERCEGEQDKRLHCYASWRNSSGSIELVKKGCWLDDFNCYDRQECVATEENPQVYFCCCEGNFCNEKFSYFPQMEVTQPTSNPVTPKPP

SEQ ID NO: 1435 - protein, 114 aa, synthetic construct
RGEAETRECIYYNANWELERTQQSGLERCEGEQDKRLHCYASWRNSSGSIELVKKGCWLDDFNCYDRQECVATEENPQVYFCCCEGNFCNEKFSYFPQMEVTQPTSNPVTPKPP

SEQ ID NO: 1436 - protein, 115 aa, synthetic construct
GRGEAETRECIYYNANWELERTQQSGLERCEGEQDKRLHCYASWRNSSGSIELVKKGCWLDDFNCYDRQECVATEENPQVYFCCCEGNFCNEKFSYFPQMEVTQPTSNPVTPKPP

SEQ ID NO: 1437 - protein, 116 aa, synthetic construct
SGRGEAETRECIYYNANWELERTQQSGLERCEGEQDKRLHCYASWRNSSGSIELVKKGCWLDDFNCYDRQECVATEENPQVYFCCCEGNFCNEKFSYFPQMEVTQPTSNPVTPKPP

SEQ ID NO: 1438 - protein, 111 aa, synthetic construct
AETRECIYYNANWELERTQQSGLERCEGEQDKRLHCYASWRNSSGTIEIVKKGCWLDDFNCYDRQECVATEENPQVYFCCCEGNFCNEKFSYFPQMEVTQPTSNPVTPKPP

SEQ ID NO: 1439 - protein, 112 aa, synthetic construct
EAETRECIYYNANWELERTQQSGLERCEGEQDKRLHCYASWRNSSGTIEIVKKGCWLDDFNCYDRQECVATEENPQVYFCCCEGNFCNEKFSYFPQMEVTQPTSNPVTPKPP

SEQ ID NO: 1440 - protein, 113 aa, synthetic construct
GEAETRECIYYNANWELERTQQSGLERCEGEQDKRLHCYASWRNSSGTIEIVKKGCWLDDFNCYDRQECVATEENPQVYFCCCEGNFCNEKFSYFPQMEVTQPTSNPVTPKPP

SEQ ID NO: 1441 - protein, 114 aa, synthetic construct
RGEAETRECIYYNANWELERTQQSGLERCEGEQDKRLHCYASWRNSSGTIEIVKKGCWLDDFNCYDRQECVATEENPQVYFCCCEGNFCNEKFSYFPQMEVTQPTSNPVTPKPP

SEQ ID NO: 1442 - protein, 115 aa, synthetic construct
GRGEAETRECIYYNANWELERTQQSGLERCEGEQDKRLHCYASWRNSSGTIEIVKKGCWLDDFNCYDRQECVATEENPQVYFCCCEGNFCNEKFSYFPQMEVTQPTSNPVTPKPP

SEQ ID NO: 1443 - protein, 116 aa, synthetic construct
SGRGEAETRECIYYNANWELERTQQSGLERCEGEQDKRLHCYASWRNSSGTIEIVKKGCWLDDFNCYDRQECVATEENPQVYFCCCEGNFCNEKFSYFPQMEVTQPTSNPVTPKPP

SEQ ID NO: 1444 - protein, 111 aa, synthetic construct
AETRECIYYNANWELERTQQSGLERCEGEQDKRLHCYASWRNSSGTIELVKQGCWLDDFNCYDRQECVATEENPQVYFCCCEGNFCNEKFSYFPQMEVTQPTSNPVTPKPP

SEQ ID NO: 1445 - protein, 112 aa, synthetic construct
EAETRECIYYNANWELERTQQSGLERCEGEQDKRLHCYASWRNSSGTIELVKQGCWLDDFNCYDRQECVATEENPQVYFCCCEGNFCNEKFSYFPQMEVTQPTSNPVTPKPP

SEQ ID NO: 1446 - protein, 113 aa, synthetic construct
GEAETRECIYYNANWELERTQQSGLERCEGEQDKRLHCYASWRNSSGTIELVKQGCWLDDFNCYDRQECVATEENPQVYFCCCEGNFCNEKFSYFPQMEVTQPTSNPVTPKPP

SEQ ID NO: 1447 - protein, 114 aa, synthetic construct
RGEAETRECIYYNANWELERTQQSGLERCEGEQDKRLHCYASWRNSSGTIELVKQGCWLDDFNCYDRQECVATEENPQVYFCCCEGNFCNEKFSYFPQMEVTQPTSNPVTPKPP

SEQ ID NO: 1448 - protein, 115 aa, synthetic construct
GRGEAETRECIYYNANWELERTQQSGLERCEGEQDKRLHCYASWRNSSGTIELVKQGCWLDDFNCYDRQECVATEENPQVYFCCCEGNFCNEKFSYFPQMEVTQPTSNPVTPKPP

SEQ ID NO: 1449 - protein, 116 aa, synthetic construct
SGRGEAETRECIYYNANWELERTQQSGLERCEGEQDKRLHCYASWRNSSGTIELVKQGCWLDDFNCYDRQECVATEENPQVYFCCCEGNFCNEKFSYFPQMEVTQPTSNPVTPKPP

SEQ ID NO: 1450 - protein, 111 aa, synthetic construct
AETRECIYYNANWELERTQQSGLERCEGEQDKRLHCYASWRNSSGTIELVKKGCWLDDFNCYDRQECVETEENPQVYFCCCEGNFCNEKFSYFPQMEVTQPTSNPVTPKPP

SEQ ID NO: 1451 - protein, 112 aa, synthetic construct
EAETRECIYYNANWELERTQQSGLERCEGEQDKRLHCYASWRNSSGTIELVKKGCWLDDFNCYDRQECVETEENPQVYFCCCEGNFCNEKFSYFPQMEVTQPTSNPVTPKPP

SEQ ID NO: 1452 - protein, 113 aa, synthetic construct
GEAETRECIYYNANWELERTQQSGLERCEGEQDKRLHCYASWRNSSGTIELVKKGCWLDDFNCYDRQECVETEENPQVYFCCCEGNFCNEKFSYFPQMEVTQPTSNPVTPKPP

SEQ ID NO: 1453 - protein, 114 aa, synthetic construct
RGEAETRECIYYNANWELERTQQSGLERCEGEQDKRLHCYASWRNSSGTIELVKKGCWLDDFNCYDRQECVETEENPQVYFCCCEGNFCNEKFSYFPQMEVTQPTSNPVTPKPP

SEQ ID NO: 1454 - protein, 115 aa, synthetic construct
GRGEAETRECIYYNANWELERTQQSGLERCEGEQDKRLHCYASWRNSSGTIELVKKGCWLDDFNCYDRQECVETEENPQVYFCCCEGNFCNEKFSYFPQMEVTQPTSNPVTPKPP

SEQ ID NO: 1455 - protein, 116 aa, synthetic construct
SGRGEAETRECIYYNANWELERTQQSGLERCEGEQDKRLHCYASWRNSSGTIELVKKGCWLDDFNCYDRQECVETEENPQVYFCCCEGNFCNEKFSYFPQMEVTQPTSNPVTPKPP

SEQ ID NO: 1456 - protein, 111 aa, synthetic construct
AETRECIYYNANWELERTQQSGLERCEGEQDKRLHCYASWRNSSGTIELVKKGCWLDDFNCYDRQECVAKEENPQVYFCCCEGNFCNEKFSYFPQMEVTQPTSNPVTPKPP

SEQ ID NO: 1457 - protein, 112 aa, synthetic construct
EAETRECIYYNANWELERTQQSGLERCEGEQDKRLHCYASWRNSSGTIELVKKGCWLDDFNCYDRQECVAKEENPQVYFCCCEGNFCNEKFSYFPQMEVTQPTSNPVTPKPP

SEQ ID NO: 1458 - protein, 113 aa, synthetic construct
GEAETRECIYYNANWELERTQQSGLERCEGEQDKRLHCYASWRNSSGTIELVKKGCWLDDFNCYDRQECVAKEENPQVYFCCCEGNFCNEKFSYFPQMEVTQPTSNPVTPKPP

SEQ ID NO: 1459 - protein, 114 aa, synthetic construct
RGEAETRECIYYNANWELERTQQSGLERCEGEQDKRLHCYASWRNSSGTIELVKKGCWLDDFNCYDRQECVAKEENPQVYFCCCEGNFCNEKFSYFPQMEVTQPTSNPVTPKPP

SEQ ID NO: 1460 - protein, 115 aa, synthetic construct
GRGEAETRECIYYNANWELERTQQSGLERCEGEQDKRLHCYASWRNSSGTIELVKKGCWLDDFNCYDRQECVAKEENPQVYFCCCEGNFCNEKFSYFPQMEVTQPTSNPVTPKPP

SEQ ID NO: 1461 - protein, 116 aa, synthetic construct
SGRGEAETRECIYYNANWELERTQQSGLERCEGEQDKRLHCYASWRNSSGTIELVKKGCWLDDFNCYDRQECVAKEENPQVYFCCCEGNFCNEKFSYFPQMEVTQPTSNPVTPKPP

SEQ ID NO: 1462 - protein, 111 aa, synthetic construct
AETRECIYYNANWELERTQQSGLERCEGEQDKRLHCYASWRNSSGTIELVKKGCWLDDFNCYDRQECVATKENPQVYFCCCEGNFCNEKFSYFPQMEVTQPTSNPVTPKPP

SEQ ID NO: 1463 - protein, 112 aa, synthetic construct
EAETRECIYYNANWELERTQQSGLERCEGEQDKRLHCYASWRNSSGTIELVKKGCWLDDFNCYDRQECVATKENPQVYFCCCEGNFCNEKFSYFPQMEVTQPTSNPVTPKPP

SEQ ID NO: 1464 - protein, 113 aa, synthetic construct
GEAETRECIYYNANWELERTQQSGLERCEGEQDKRLHCYASWRNSSGTIELVKKGCWLDDFNCYDRQECVATKENPQVYFCCCEGNFCNEKFSYFPQMEVTQPTSNPVTPKPP

SEQ ID NO: 1465 - protein, 114 aa, synthetic construct
RGEAETRECIYYNANWELERTQQSGLERCEGEQDKRLHCYASWRNSSGTIELVKKGCWLDDFNCYDRQECVATKENPQVYFCCCEGNFCNEKFSYFPQMEVTQPTSNPVTPKPP

SEQ ID NO: 1466 - protein, 115 aa, synthetic construct
GRGEAETRECIYYNANWELERTQQSGLERCEGEQDKRLHCYASWRNSSGTIELVKKGCWLDDFNCYDRQECVATKENPQVYFCCCEGNFCNEKFSYFPQMEVTQPTSNPVTPKPP

SEQ ID NO: 1467 - protein, 116 aa, synthetic construct
SGRGEAETRECIYYNANWELERTQQSGLERCEGEQDKRLHCYASWRNSSGTIELVKKGCWLDDFNCYDRQECVATKENPQVYFCCCEGNFCNEKFSYFPQMEVTQPTSNPVTPKPP

SEQ ID NO: 1468 - protein, 111 aa, synthetic construct
AETRECIYYNANWELERTQQSGLERCEGEQDKRLHCYASWRNSSGTIELVKKGCWLDDFNCYDRQECVATEDNPQVYFCCCEGNFCNEKFSYFPQMEVTQPTSNPVTPKPP

SEQ ID NO: 1469 - protein, 112 aa, synthetic construct
EAETRECIYYNANWELERTQQSGLERCEGEQDKRLHCYASWRNSSGTIELVKKGCWLDDFNCYDRQECVATEDNPQVYFCCCEGNFCNEKFSYFPQMEVTQPTSNPVTPKPP

SEQ ID NO: 1470 - protein, 113 aa, synthetic construct
GEAETRECIYYNANWELERTQQSGLERCEGEQDKRLHCYASWRNSSGTIELVKKGCWLDDFNCYDRQECVATEDNPQVYFCCCEGNFCNEKFSYFPQMEVTQPTSNPVTPKPP

SEQ ID NO: 1471 - protein, 114 aa, synthetic construct
RGEAETRECIYYNANWELERTQQSGLERCEGEQDKRLHCYASWRNSSGTIELVKKGCWLDDFNCYDRQECVATEDNPQVYFCCCEGNFCNEKFSYFPQMEVTQPTSNPVTPKPP

SEQ ID NO: 1472 - protein, 115 aa, synthetic construct
GRGEAETRECIYYNANWELERTQQSGLERCEGEQDKRLHCYASWRNSSGTIELVKKGCWLDDFNCYDRQECVATEDNPQVYFCCCEGNFCNEKFSYFPQMEVTQPTSNPVTPKPP

SEQ ID NO: 1473 - protein, 116 aa, synthetic construct
SGRGEAETRECIYYNANWELERTQQSGLERCEGEQDKRLHCYASWRNSSGTIELVKKGCWLDDFNCYDRQECVATEDNPQVYFCCCEGNFCNEKFSYFPQMEVTQPTSNPVTPKPP

SEQ ID NO: 1474 - protein, 111 aa, synthetic construct
AETRECIYYNANWELERTQQSGLERCEGEQDKRLHCYASWRNSSGTIELVKKGCWLDDFNCYDRQECVATEESPQVYFCCCEGNFCNEKFSYFPQMEVTQPTSNPVTPKPP

SEQ ID NO: 1475 - protein, 112 aa, synthetic construct
EAETRECIYYNANWELERTQQSGLERCEGEQDKRLHCYASWRNSSGTIELVKKGCWLDDFNCYDRQECVATEESPQVYFCCCEGNFCNEKFSYFPQMEVTQPTSNPVTPKPP

SEQ ID NO: 1476 - protein, 113 aa, synthetic construct
GEAETRECIYYNANWELERTQQSGLERCEGEQDKRLHCYASWRNSSGTIELVKKGCWLDDFNCYDRQECVATEESPQVYFCCCEGNFCNEKFSYFPQMEVTQPTSNPVTPKPP

SEQ ID NO: 1477 - protein, 114 aa, synthetic construct
RGEAETRECIYYNANWELERTQQSGLERCEGEQDKRLHCYASWRNSSGTIELVKKGCWLDDFNCYDRQECVATEESPQVYFCCCEGNFCNEKFSYFPQMEVTQPTSNPVTPKPP

SEQ ID NO: 1478 - protein, 115 aa, synthetic construct
GRGEAETRECIYYNANWELERTQQSGLERCEGEQDKRLHCYASWRNSSGTIELVKKGCWLDDFNCYDRQECVATEESPQVYFCCCEGNFCNEKFSYFPQMEVTQPTSNPVTPKPP

SEQ ID NO: 1479 - protein, 116 aa, synthetic construct
SGRGEAETRECIYYNANWELERTQQSGLERCEGEQDKRLHCYASWRNSSGTIELVKKGCWLDDFNCYDRQECVATEESPQVYFCCCEGNFCNEKFSYFPQMEVTQPTSNPVTPKPP

SEQ ID NO: 1480 - protein, 111 aa, synthetic construct
AETRECIYYNANWELERTQQSGLERCEGEQDKRLHCYASWRNSSGTIELVKKGCWLDDFNCYDRQECVATEENPEVYFCCCEGNFCNEKFSYFPQMEVTQPTSNPVTPKPP

SEQ ID NO: 1481 - protein, 112 aa, synthetic construct
EAETRECIYYNANWELERTQQSGLERCEGEQDKRLHCYASWRNSSGTIELVKKGCWLDDFNCYDRQECVATEENPEVYFCCCEGNFCNEKFSYFPQMEVTQPTSNPVTPKPP

SEQ ID NO: 1482 - protein, 113 aa, synthetic construct
GEAETRECIYYNANWELERTQQSGLERCEGEQDKRLHCYASWRNSSGTIELVKKGCWLDDFNCYDRQECVATEENPEVYFCCCEGNFCNEKFSYFPQMEVTQPTSNPVTPKPP

SEQ ID NO: 1483 - protein, 114 aa, synthetic construct
RGEAETRECIYYNANWELERTQQSGLERCEGEQDKRLHCYASWRNSSGTIELVKKGCWLDDFNCYDRQECVATEENPEVYFCCCEGNFCNEKFSYFPQMEVTQPTSNPVTPKPP

SEQ ID NO: 1484 - protein, 115 aa, synthetic construct
GRGEAETRECIYYNANWELERTQQSGLERCEGEQDKRLHCYASWRNSSGTIELVKKGCWLDDFNCYDRQECVATEENPEVYFCCCEGNFCNEKFSYFPQMEVTQPTSNPVTPKPP

SEQ ID NO: 1485 - protein, 116 aa, synthetic construct
SGRGEAETRECIYYNANWELERTQQSGLERCEGEQDKRLHCYASWRNSSGTIELVKKGCWLDDFNCYDRQECVATEENPEVYFCCCEGNFCNEKFSYFPQMEVTQPTSNPVTPKPP

SEQ ID NO: 1486 - protein, 111 aa, synthetic construct
AETRECIYYNANWELERTQQSGLERCEGDKDKRLHCYASWRNSSGTIELVKKGCWLDDFNCYDRQECVETEENPQVYFCCCEGNFCNEKFSYFPQMEVTQPTSNPVTPKPP

SEQ ID NO: 1487 - protein, 112 aa, synthetic construct
EAETRECIYYNANWELERTQQSGLERCEGDKDKRLHCYASWRNSSGTIELVKKGCWLDDFNCYDRQECVETEENPQVYFCCCEGNFCNEKFSYFPQMEVTQPTSNPVTPKPP

SEQ ID NO: 1488 - protein, 113 aa, synthetic construct
GEAETRECIYYNANWELERTQQSGLERCEGDKDKRLHCYASWRNSSGTIELVKKGCWLDDFNCYDRQECVETEENPQVYFCCCEGNFCNEKFSYFPQMEVTQPTSNPVTPKPP

SEQ ID NO: 1489 - protein, 114 aa, synthetic construct
RGEAETRECIYYNANWELERTQQSGLERCEGDKDKRLHCYASWRNSSGTIELVKKGCWLDDFNCYDRQECVETEENPQVYFCCCEGNFCNEKFSYFPQMEVTQPTSNPVTPKPP

SEQ ID NO: 1490 - protein, 115 aa, synthetic construct
GRGEAETRECIYYNANWELERTQQSGLERCEGDKDKRLHCYASWRNSSGTIELVKKGCWLDDFNCYDRQECVETEENPQVYFCCCEGNFCNEKFSYFPQMEVTQPTSNPVTPKPP

SEQ ID NO: 1491 - protein, 116 aa, synthetic construct
SGRGEAETRECIYYNANWELERTQQSGLERCEGDKDKRLHCYASWRNSSGTIELVKKGCWLDDFNCYDRQECVETEENPQVYFCCCEGNFCNEKFSYFPQMEVTQPTSNPVTPKPP

SEQ ID NO: 1492 - protein, 111 aa, synthetic construct
AETRECIYYNANWELERTQQSGLERCEGEKDKRLHCYASWRNSSGTIELVKKGCWLDDFNCYDRQECVAKEENPQVYFCCCEGNFCNEKFSYFPQMEVTQPTSNPVTPKPP

SEQ ID NO: 1493 - protein, 112 aa, synthetic construct
EAETRECIYYNANWELERTQQSGLERCEGEKDKRLHCYASWRNSSGTIELVKKGCWLDDFNCYDRQECVAKEENPQVYFCCCEGNFCNEKFSYFPQMEVTQPTSNPVTPKPP

SEQ ID NO: 1494 - protein, 113 aa, synthetic construct
GEAETRECIYYNANWELERTQQSGLERCEGEKDKRLHCYASWRNSSGTIELVKKGCWLDDFNCYDRQECVAKEENPQVYFCCCEGNFCNEKFSYFPQMEVTQPTSNPVTPKPP

SEQ ID NO: 1495 - protein, 114 aa, synthetic construct
RGEAETRECIYYNANWELERTQQSGLERCEGEKDKRLHCYASWRNSSGTIELVKKGCWLDDFNCYDRQECVAKEENPQVYFCCCEGNFCNEKFSYFPQMEVTQPTSNPVTPKPP

SEQ ID NO: 1496 - protein, 115 aa, synthetic construct
GRGEAETRECIYYNANWELERTQQSGLERCEGEKDKRLHCYASWRNSSGTIELVKKGCWLDDFNCYDRQECVAKEENPQVYFCCCEGNFCNEKFSYFPQMEVTQPTSNPVTPKPP

SEQ ID NO: 1497 - protein, 116 aa, synthetic construct
SGRGEAETRECIYYNANWELERTQQSGLERCEGEKDKRLHCYASWRNSSGTIELVKKGCWLDDFNCYDRQECVAKEENPQVYFCCCEGNFCNEKFSYFPQMEVTQPTSNPVTPKPP

SEQ ID NO: 1498 - protein, 111 aa, synthetic construct
AETRECIYYNANWELERTQQSGLERCEGDQDKRLHCYASWRNSSGTIELVKKGCWLDDFNCYDRQECVATKENPQVYFCCCEGNFCNEKFSYFPQMEVTQPTSNPVTPKPP

SEQ ID NO: 1499 - protein, 112 aa, synthetic construct
EAETRECIYYNANWELERTQQSGLERCEGDQDKRLHCYASWRNSSGTIELVKKGCWLDDFNCYDRQECVATKENPQVYFCCCEGNFCNEKFSYFPQMEVTQPTSNPVTPKPP

SEQ ID NO: 1500 - protein, 113 aa, synthetic construct
GEAETRECIYYNANWELERTQQSGLERCEGDQDKRLHCYASWRNSSGTIELVKKGCWLDDFNCYDRQECVATKENPQVYFCCCEGNFCNEKFSYFPQMEVTQPTSNPVTPKPP

SEQ ID NO: 1501 - protein, 114 aa, synthetic construct
RGEAETRECIYYNANWELERTQQSGLERCEGDQDKRLHCYASWRNSSGTIELVKKGCWLDDFNCYDRQECVATKENPQVYFCCCEGNFCNEKFSYFPQMEVTQPTSNPVTPKPP

SEQ ID NO: 1502 - protein, 115 aa, synthetic construct
GRGEAETRECIYYNANWELERTQQSGLERCEGDQDKRLHCYASWRNSSGTIELVKKGCWLDDFNCYDRQECVATKENPQVYFCCCEGNFCNEKFSYFPQMEVTQPTSNPVTPKPP

SEQ ID NO: 1503 - protein, 116 aa, synthetic construct
SGRGEAETRECIYYNANWELERTQQSGLERCEGDQDKRLHCYASWRNSSGTIELVKKGCWLDDFNCYDRQECVATKENPQVYFCCCEGNFCNEKFSYFPQMEVTQPTSNPVTPKPP

SEQ ID NO: 1504 - protein, 111 aa, synthetic construct
AETRECIYYNANWELERTQQSGLERCEGDKDKRLHCYASWRNSSGTIELVKQGCWLDDFNCYDRQECVAKKENPQVYFCCCEGNFCNEKFSYFPQMEVTQPTSNPVTPKPP

SEQ ID NO: 1505 - protein, 112 aa, synthetic construct
EAETRECIYYNANWELERTQQSGLERCEGDKDKRLHCYASWRNSSGTIELVKQGCWLDDFNCYDRQECVAKKENPQVYFCCCEGNFCNEKFSYFPQMEVTQPTSNPVTPKPP

SEQ ID NO: 1506 - protein, 113 aa, synthetic construct
GEAETRECIYYNANWELERTQQSGLERCEGDKDKRLHCYASWRNSSGTIELVKQGCWLDDFNCYDRQECVAKKENPQVYFCCCEGNFCNEKFSYFPQMEVTQPTSNPVTPKPP

SEQ ID NO: 1507 - protein, 114 aa, synthetic construct
RGEAETRECIYYNANWELERTQQSGLERCEGDKDKRLHCYASWRNSSGTIELVKQGCWLDDFNCYDRQECVAKKENPQVYFCCCEGNFCNEKFSYFPQMEVTQPTSNPVTPKPP

SEQ ID NO: 1508 - protein, 115 aa, synthetic construct
GRGEAETRECIYYNANWELERTQQSGLERCEGDKDKRLHCYASWRNSSGTIELVKQGCWLDDFNCYDRQECVAKKENPQVYFCCCEGNFCNEKFSYFPQMEVTQPTSNPVTPKPP

SEQ ID NO: 1509 - protein, 116 aa, synthetic construct
SGRGEAETRECIYYNANWELERTQQSGLERCEGDKDKRLHCYASWRNSSGTIELVKQGCWLDDFNCYDRQECVAKKENPQVYFCCCEGNFCNEKFSYFPQMEVTQPTSNPVTPKPP

SEQ ID NO: 1510 - protein, 111 aa, synthetic construct
AETRECIYYNANWELERTQQSGLERCEGDKDKRLHCYASWRNSSGTIEIVKQGCWLDDFNCYDRQECVAEKENPQVYFCCCEGNFCNEKFSYFPQMEVTQPTSNPVTPKPP

SEQ ID NO: 1511 - protein, 112 aa, synthetic construct
EAETRECIYYNANWELERTQQSGLERCEGDKDKRLHCYASWRNSSGTIEIVKQGCWLDDFNCYDRQECVAEKENPQVYFCCCEGNFCNEKFSYFPQMEVTQPTSNPVTPKPP

SEQ ID NO: 1512 - protein, 113 aa, synthetic construct
GEAETRECIYYNANWELERTQQSGLERCEGDKDKRLHCYASWRNSSGTIEIVKQGCWLDDFNCYDRQECVAEKENPQVYFCCCEGNFCNEKFSYFPQMEVTQPTSNPVTPKPP

SEQ ID NO: 1513 - protein, 114 aa, synthetic construct
RGEAETRECIYYNANWELERTQQSGLERCEGDKDKRLHCYASWRNSSGTIEIVKQGCWLDDFNCYDRQECVAEKENPQVYFCCCEGNFCNEKFSYFPQMEVTQPTSNPVTPKPP

SEQ ID NO: 1514 - protein, 115 aa, synthetic construct
GRGEAETRECIYYNANWELERTQQSGLERCEGDKDKRLHCYASWRNSSGTIEIVKQGCWLDDFNCYDRQECVAEKENPQVYFCCCEGNFCNEKFSYFPQMEVTQPTSNPVTPKPP

SEQ ID NO: 1515 - protein, 116 aa, synthetic construct
SGRGEAETRECIYYNANWELERTQQSGLERCEGDKDKRLHCYASWRNSSGTIEIVKQGCWLDDFNCYDRQECVAEKENPQVYFCCCEGNFCNEKFSYFPQMEVTQPTSNPVTPKPP

SEQ ID NO: 1516 - protein, 111 aa, synthetic construct
AETRECIYYNANWELERTQQSGLERCYGDQDKRLHCYASWRNSSGSIEIVKQGCWLDDFNCYDRQECVAKKENPQVYFCCCEGNFCNEKFSYFPQMEVTQPTSNPVTPKPP

SEQ ID NO: 1517 - protein, 112 aa, synthetic construct
EAETRECIYYNANWELERTQQSGLERCYGDQDKRLHCYASWRNSSGSIEIVKQGCWLDDFNCYDRQECVAKKENPQVYFCCCEGNFCNEKFSYFPQMEVTQPTSNPVTPKPP

SEQ ID NO: 1518 - protein, 113 aa, synthetic construct
GEAETRECIYYNANWELERTQQSGLERCYGDQDKRLHCYASWRNSSGSIEIVKQGCWLDDFNCYDRQECVAKKENPQVYFCCCEGNFCNEKFSYFPQMEVTQPTSNPVTPKPP

SEQ ID NO: 1519 - protein, 114 aa, synthetic construct
RGEAETRECIYYNANWELERTQQSGLERCYGDQDKRLHCYASWRNSSGSIEIVKQGCWLDDFNCYDRQECVAKKENPQVYFCCCEGNFCNEKFSYFPQMEVTQPTSNPVTPKPP

SEQ ID NO: 1520 - protein, 115 aa, synthetic construct
GRGEAETRECIYYNANWELERTQQSGLERCYGDQDKRLHCYASWRNSSGSIEIVKQGCWLDDFNCYDRQECVAKKENPQVYFCCCEGNFCNEKFSYFPQMEVTQPTSNPVTPKPP

SEQ ID NO: 1521 - protein, 116 aa, synthetic construct
SGRGEAETRECIYYNANWELERTQQSGLERCYGDQDKRLHCYASWRNSSGSIEIVKQGCWLDDFNCYDRQECVAKKENPQVYFCCCEGNFCNEKFSYFPQMEVTQPTSNPVTPKPP

SEQ ID NO: 1522 - protein, 111 aa, synthetic construct
AETRECIYYNANWELERTQQSGLERCEGEKDKRRHCYASWRNSSGTIEIVKKGCWLDDFNCYDRQECVATKENPQVYFCCCEGNFCNEKFSYFPQMEVTQPTSNPVTPKPP

SEQ ID NO: 1523 - protein, 112 aa, synthetic construct
EAETRECIYYNANWELERTQQSGLERCEGEKDKRRHCYASWRNSSGTIEIVKKGCWLDDFNCYDRQECVATKENPQVYFCCCEGNFCNEKFSYFPQMEVTQPTSNPVTPKPP

SEQ ID NO: 1524 - protein, 113 aa, synthetic construct
GEAETRECIYYNANWELERTQQSGLERCEGEKDKRRHCYASWRNSSGTIEIVKKGCWLDDFNCYDRQECVATKENPQVYFCCCEGNFCNEKFSYFPQMEVTQPTSNPVTPKPP

SEQ ID NO: 1525 - protein, 114 aa, synthetic construct
RGEAETRECIYYNANWELERTQQSGLERCEGEKDKRRHCYASWRNSSGTIEIVKKGCWLDDFNCYDRQECVATKENPQVYFCCCEGNFCNEKFSYFPQMEVTQPTSNPVTPKPP

SEQ ID NO: 1526 - protein, 115 aa, synthetic construct
GRGEAETRECIYYNANWELERTQQSGLERCEGEKDKRRHCYASWRNSSGTIEIVKKGCWLDDFNCYDRQECVATKENPQVYFCCCEGNFCNEKFSYFPQMEVTQPTSNPVTPKPP

SEQ ID NO: 1527 - protein, 116 aa, synthetic construct
SGRGEAETRECIYYNANWELERTQQSGLERCEGEKDKRRHCYASWRNSSGTIEIVKKGCWLDDFNCYDRQECVATKENPQVYFCCCEGNFCNEKFSYFPQMEVTQPTSNPVTPKPP

SEQ ID NO: 1528 - protein, 111 aa, synthetic construct
AETRECIYYNANWELERTQQSGLERCYGDQDKRRHCYASWRNSSGTIELVKKGCWLDDFNCYDRQECVATEENPEVYFCCCEGNFCNEKFSYFPQMEVTQPTSNPVTPKPP

SEQ ID NO: 1529 - protein, 112 aa, synthetic construct
EAETRECIYYNANWELERTQQSGLERCYGDQDKRRHCYASWRNSSGTIELVKKGCWLDDFNCYDRQECVATEENPEVYFCCCEGNFCNEKFSYFPQMEVTQPTSNPVTPKPP

SEQ ID NO: 1530 - protein, 113 aa, synthetic construct
GEAETRECIYYNANWELERTQQSGLERCYGDQDKRRHCYASWRNSSGTIELVKKGCWLDDFNCYDRQECVATEENPEVYFCCCEGNFCNEKFSYFPQMEVTQPTSNPVTPKPP

SEQ ID NO: 1531 - protein, 114 aa, synthetic construct
RGEAETRECIYYNANWELERTQQSGLERCYGDQDKRRHCYASWRNSSGTIELVKKGCWLDDFNCYDRQECVATEENPEVYFCCCEGNFCNEKFSYFPQMEVTQPTSNPVTPKPP

SEQ ID NO: 1532 - protein, 115 aa, synthetic construct
GRGEAETRECIYYNANWELERTQQSGLERCYGDQDKRRHCYASWRNSSGTIELVKKGCWLDDFNCYDRQECVATEENPEVYFCCCEGNFCNEKFSYFPQMEVTQPTSNPVTPKPP

SEQ ID NO: 1533 - protein, 116 aa, synthetic construct
SGRGEAETRECIYYNANWELERTQQSGLERCYGDQDKRRHCYASWRNSSGTIELVKKGCWLDDFNCYDRQECVATEENPEVYFCCCEGNFCNEKFSYFPQMEVTQPTSNPVTPKPP

SEQ ID NO: 1534 - protein, 111 aa, synthetic construct
AETRECIYYNANWELERTQQSGLERCEGEQDKRRHCYASWRNSSGTIELVKKGCWLDDFNCYDRQECVATEENPQVYFCCCEGNFCNEKFSYFPQMEVTQPTSNPVTPKPP

SEQ ID NO: 1535 - protein, 112 aa, synthetic construct
EAETRECIYYNANWELERTQQSGLERCEGEQDKRRHCYASWRNSSGTIELVKKGCWLDDFNCYDRQECVATEENPQVYFCCCEGNFCNEKFSYFPQMEVTQPTSNPVTPKPP

SEQ ID NO: 1536 - protein, 113 aa, synthetic construct
GEAETRECIYYNANWELERTQQSGLERCEGEQDKRRHCYASWRNSSGTIELVKKGCWLDDFNCYDRQECVATEENPQVYFCCCEGNFCNEKFSYFPQMEVTQPTSNPVTPKPP

SEQ ID NO: 1537 - protein, 114 aa, synthetic construct
RGEAETRECIYYNANWELERTQQSGLERCEGEQDKRRHCYASWRNSSGTIELVKKGCWLDDFNCYDRQECVATEENPQVYFCCCEGNFCNEKFSYFPQMEVTQPTSNPVTPKPP

SEQ ID NO: 1538 - protein, 115 aa, synthetic construct
GRGEAETRECIYYNANWELERTQQSGLERCEGEQDKRRHCYASWRNSSGTIELVKKGCWLDDFNCYDRQECVATEENPQVYFCCCEGNFCNEKFSYFPQMEVTQPTSNPVTPKPP

SEQ ID NO: 1539 - protein, 116 aa, synthetic construct
SGRGEAETRECIYYNANWELERTQQSGLERCEGEQDKRRHCYASWRNSSGTIELVKKGCWLDDFNCYDRQECVATEENPQVYFCCCEGNFCNEKFSYFPQMEVTQPTSNPVTPKPP

SEQ ID NO: 1540 - protein, 111 aa, synthetic construct
AETRECIYYNANWELERTQQSGLERCYGEQDKRLHCYASWRNSSGSIEIVKKGCWLDDFNCYDRTDCVATEENPQVYFCCCEGNFCNEKFSYFPQMEVTQPTSNPVTPKPP

SEQ ID NO: 1541 - protein, 112 aa, synthetic construct
EAETRECIYYNANWELERTQQSGLERCYGEQDKRLHCYASWRNSSGSIEIVKKGCWLDDFNCYDRTDCVATEENPQVYFCCCEGNFCNEKFSYFPQMEVTQPTSNPVTPKPP

SEQ ID NO: 1542 - protein, 113 aa, synthetic construct
GEAETRECIYYNANWELERTQQSGLERCYGEQDKRLHCYASWRNSSGSIEIVKKGCWLDDFNCYDRTDCVATEENPQVYFCCCEGNFCNEKFSYFPQMEVTQPTSNPVTPKPP

SEQ ID NO: 1543 - protein, 114 aa, synthetic construct
RGEAETRECIYYNANWELERTQQSGLERCYGEQDKRLHCYASWRNSSGSIEIVKKGCWLDDFNCYDRTDCVATEENPQVYFCCCEGNFCNEKFSYFPQMEVTQPTSNPVTPKPP

SEQ ID NO: 1544 - protein, 115 aa, synthetic construct
GRGEAETRECIYYNANWELERTQQSGLERCYGEQDKRLHCYASWRNSSGSIEIVKKGCWLDDFNCYDRTDCVATEENPQVYFCCCEGNFCNEKFSYFPQMEVTQPTSNPVTPKPP

SEQ ID NO: 1545 - protein, 116 aa, synthetic construct
SGRGEAETRECIYYNANWELERTQQSGLERCYGEQDKRLHCYASWRNSSGSIEIVKKGCWLDDFNCYDRTDCVATEENPQVYFCCCEGNFCNEKFSYFPQMEVTQPTSNPVTPKPP

SEQ ID NO: 1546 - protein, 111 aa, synthetic construct
AETRECIYYNANWELERTQQSGLERCEGEQDKRRHCYASWRNSSGSIELVKKGCWLDDFNCYDRQECVAKEENPQVYFCCCEGNFCNEKFSYFPQMEVTQPTSNPVTPKPP

SEQ ID NO: 1547 - protein, 112 aa, synthetic construct
EAETRECIYYNANWELERTQQSGLERCEGEQDKRRHCYASWRNSSGSIELVKKGCWLDDFNCYDRQECVAKEENPQVYFCCCEGNFCNEKFSYFPQMEVTQPTSNPVTPKPP

SEQ ID NO: 1548 - protein, 113 aa, synthetic construct
GEAETRECIYYNANWELERTQQSGLERCEGEQDKRRHCYASWRNSSGSIELVKKGCWLDDFNCYDRQECVAKEENPQVYFCCCEGNFCNEKFSYFPQMEVTQPTSNPVTPKPP

SEQ ID NO: 1549 - protein, 114 aa, synthetic construct
RGEAETRECIYYNANWELERTQQSGLERCEGEQDKRRHCYASWRNSSGSIELVKKGCWLDDFNCYDRQECVAKEENPQVYFCCCEGNFCNEKFSYFPQMEVTQPTSNPVTPKPP

SEQ ID NO: 1550 - protein, 115 aa, synthetic construct
GRGEAETRECIYYNANWELERTQQSGLERCEGEQDKRRHCYASWRNSSGSIELVKKGCWLDDFNCYDRQECVAKEENPQVYFCCCEGNFCNEKFSYFPQMEVTQPTSNPVTPKPP

SEQ ID NO: 1551 - protein, 116 aa, synthetic construct
SGRGEAETRECIYYNANWELERTQQSGLERCEGEQDKRRHCYASWRNSSGSIELVKKGCWLDDFNCYDRQECVAKEENPQVYFCCCEGNFCNEKFSYFPQMEVTQPTSNPVTPKPP

SEQ ID NO: 1552 - protein, 111 aa, synthetic construct
AETRECIYYNANWELERTQQSGLERCEGEQDKRRHCYASWRNSSGTIEIVKKGCWLDDFNCYDRQECVAKEENPQVYFCCCEGNFCNEKFSYFPQMEVTQPTSNPVTPKPP

SEQ ID NO: 1553 - protein, 112 aa, synthetic construct
EAETRECIYYNANWELERTQQSGLERCEGEQDKRRHCYASWRNSSGTIEIVKKGCWLDDFNCYDRQECVAKEENPQVYFCCCEGNFCNEKFSYFPQMEVTQPTSNPVTPKPP

SEQ ID NO: 1554 - protein, 113 aa, synthetic construct
GEAETRECIYYNANWELERTQQSGLERCEGEQDKRRHCYASWRNSSGTIEIVKKGCWLDDFNCYDRQECVAKEENPQVYFCCCEGNFCNEKFSYFPQMEVTQPTSNPVTPKPP

SEQ ID NO: 1555 - protein, 114 aa, synthetic construct
RGEAETRECIYYNANWELERTQQSGLERCEGEQDKRRHCYASWRNSSGTIEIVKKGCWLDDFNCYDRQECVAKEENPQVYFCCCEGNFCNEKFSYFPQMEVTQPTSNPVTPKPP

SEQ ID NO: 1556 - protein, 115 aa, synthetic construct
GRGEAETRECIYYNANWELERTQQSGLERCEGEQDKRRHCYASWRNSSGTIEIVKKGCWLDDFNCYDRQECVAKEENPQVYFCCCEGNFCNEKFSYFPQMEVTQPTSNPVTPKPP

SEQ ID NO: 1557 - protein, 116 aa, synthetic construct
SGRGEAETRECIYYNANWELERTQQSGLERCEGEQDKRRHCYASWRNSSGTIEIVKKGCWLDDFNCYDRQECVAKEENPQVYFCCCEGNFCNEKFSYFPQMEVTQPTSNPVTPKPP

SEQ ID NO: 1558 - protein, 111 aa, synthetic construct
AETRECIYYNANWELERTQQSGLERCEGEQDKRRHCYASWRNSSGSIEIVKKGCWLDDFNCYDRQECVATKENPQVYFCCCEGNFCNEKFSYFPQMEVTQPTSNPVTPKPP

SEQ ID NO: 1559 - protein, 112 aa, synthetic construct
EAETRECIYYNANWELERTQQSGLERCEGEQDKRRHCYASWRNSSGSIEIVKKGCWLDDFNCYDRQECVATKENPQVYFCCCEGNFCNEKFSYFPQMEVTQPTSNPVTPKPP

SEQ ID NO: 1560 - protein, 113 aa, synthetic construct
GEAETRECIYYNANWELERTQQSGLERCEGEQDKRRHCYASWRNSSGSIEIVKKGCWLDDFNCYDRQECVATKENPQVYFCCCEGNFCNEKFSYFPQMEVTQPTSNPVTPKPP

SEQ ID NO: 1561 - protein, 114 aa, synthetic construct
RGEAETRECIYYNANWELERTQQSGLERCEGEQDKRRHCYASWRNSSGSIEIVKKGCWLDDFNCYDRQECVATKENPQVYFCCCEGNFCNEKFSYFPQMEVTQPTSNPVTPKPP

SEQ ID NO: 1562 - protein, 115 aa, synthetic construct
GRGEAETRECIYYNANWELERTQQSGLERCEGEQDKRRHCYASWRNSSGSIEIVKKGCWLDDFNCYDRQECVATKENPQVYFCCCEGNFCNEKFSYFPQMEVTQPTSNPVTPKPP

SEQ ID NO: 1563 - protein, 116 aa, synthetic construct
SGRGEAETRECIYYNANWELERTQQSGLERCEGEQDKRRHCYASWRNSSGSIEIVKKGCWLDDFNCYDRQECVATKENPQVYFCCCEGNFCNEKFSYFPQMEVTQPTSNPVTPKPP

SEQ ID NO: 1564 - protein, 111 aa, synthetic construct
AETRECIYYNANWELERTQQSGLERCEGDQDKRLHCYASWRNSSGTIEIVKKGCWLDDFNCYDRQECVATKENPQVYFCCCEGNFCNEKFSYFPQMEVTQPTSNPVTPKPP

SEQ ID NO: 1565 - protein, 112 aa, synthetic construct
EAETRECIYYNANWELERTQQSGLERCEGDQDKRLHCYASWRNSSGTIEIVKKGCWLDDFNCYDRQECVATKENPQVYFCCCEGNFCNEKFSYFPQMEVTQPTSNPVTPKPP

SEQ ID NO: 1566 - protein, 113 aa, synthetic construct
GEAETRECIYYNANWELERTQQSGLERCEGDQDKRLHCYASWRNSSGTIEIVKKGCWLDDFNCYDRQECVATKENPQVYFCCCEGNFCNEKFSYFPQMEVTQPTSNPVTPKPP

SEQ ID NO: 1567 - protein, 114 aa, synthetic construct
RGEAETRECIYYNANWELERTQQSGLERCEGDQDKRLHCYASWRNSSGTIEIVKKGCWLDDFNCYDRQECVATKENPQVYFCCCEGNFCNEKFSYFPQMEVTQPTSNPVTPKPP

SEQ ID NO: 1568 - protein, 115 aa, synthetic construct
GRGEAETRECIYYNANWELERTQQSGLERCEGDQDKRLHCYASWRNSSGTIEIVKKGCWLDDFNCYDRQECVATKENPQVYFCCCEGNFCNEKFSYFPQMEVTQPTSNPVTPKPP

SEQ ID NO: 1569 - protein, 116 aa, synthetic construct
SGRGEAETRECIYYNANWELERTQQSGLERCEGDQDKRLHCYASWRNSSGTIEIVKKGCWLDDFNCYDRQECVATKENPQVYFCCCEGNFCNEKFSYFPQMEVTQPTSNPVTPKPP

SEQ ID NO: 1570 - protein, 111 aa, synthetic construct
AETRECIYYNANWELERTQQSGLERCEGDQDKRLHCYASWRNSSGSIELVKKGCWLDDFNCYDRQECVATKENPQVYFCCCEGNFCNEKFSYFPQMEVTQPTSNPVTPKPP

SEQ ID NO: 1571 - protein, 112 aa, synthetic construct
EAETRECIYYNANWELERTQQSGLERCEGDQDKRLHCYASWRNSSGSIELVKKGCWLDDFNCYDRQECVATKENPQVYFCCCEGNFCNEKFSYFPQMEVTQPTSNPVTPKPP

SEQ ID NO: 1572 - protein, 113 aa, synthetic construct
GEAETRECIYYNANWELERTQQSGLERCEGDQDKRLHCYASWRNSSGSIELVKKGCWLDDFNCYDRQECVATKENPQVYFCCCEGNFCNEKFSYFPQMEVTQPTSNPVTPKPP

SEQ ID NO: 1573 - protein, 114 aa, synthetic construct
RGEAETRECIYYNANWELERTQQSGLERCEGDQDKRLHCYASWRNSSGSIELVKKGCWLDDFNCYDRQECVATKENPQVYFCCCEGNFCNEKFSYFPQMEVTQPTSNPVTPKPP

SEQ ID NO: 1574 - protein, 115 aa, synthetic construct
GRGEAETRECIYYNANWELERTQQSGLERCEGDQDKRLHCYASWRNSSGSIELVKKGCWLDDFNCYDRQECVATKENPQVYFCCCEGNFCNEKFSYFPQMEVTQPTSNPVTPKPP

SEQ ID NO: 1575 - protein, 116 aa, synthetic construct
SGRGEAETRECIYYNANWELERTQQSGLERCEGDQDKRLHCYASWRNSSGSIELVKKGCWLDDFNCYDRQECVATKENPQVYFCCCEGNFCNEKFSYFPQMEVTQPTSNPVTPKPP

SEQ ID NO: 1576 - protein, 111 aa, synthetic construct; identical to SEQ ID NO: 1498

SEQ ID NO: 1577 - protein, 112 aa, synthetic construct; identical to SEQ ID NO: 1499

SEQ ID NO: 1578 - protein, 113 aa, synthetic construct; identical to SEQ ID NO: 1500

SEQ ID NO: 1579 - protein, 114 aa, synthetic construct; identical to SEQ ID NO: 1501

SEQ ID NO: 1580 - protein, 115 aa, synthetic construct; identical to SEQ ID NO: 1502

SEQ ID NO: 1581 - protein, 116 aa, synthetic construct; identical to SEQ ID NO: 1503

SEQ ID NO: 1582 - protein, 111 aa, synthetic construct
AETRECIYYNANWELERTQQSGLERCEGEQDKRLHCYASWRNSSGTIEIVKKGCWLDDFNCYDRQECVATKENPQVYFCCCEGNFCNEKFSYFPQMEVTQPTSNPVTPKPP

SEQ ID NO: 1583 - protein, 112 aa, synthetic construct
EAETRECIYYNANWELERTQQSGLERCEGEQDKRLHCYASWRNSSGTIEIVKKGCWLDDFNCYDRQECVATKENPQVYFCCCEGNFCNEKFSYFPQMEVTQPTSNPVTPKPP

SEQ ID NO: 1584 - protein, 113 aa, synthetic construct
GEAETRECIYYNANWELERTQQSGLERCEGEQDKRLHCYASWRNSSGTIEIVKKGCWLDDFNCYDRQECVATKENPQVYFCCCEGNFCNEKFSYFPQMEVTQPTSNPVTPKPP

SEQ ID NO: 1585 - protein, 114 aa, synthetic construct
RGEAETRECIYYNANWELERTQQSGLERCEGEQDKRLHCYASWRNSSGTIEIVKKGCWLDDFNCYDRQECVATKENPQVYFCCCEGNFCNEKFSYFPQMEVTQPTSNPVTPKPP

SEQ ID NO: 1586 - protein, 115 aa, synthetic construct
GRGEAETRECIYYNANWELERTQQSGLERCEGEQDKRLHCYASWRNSSGTIEIVKKGCWLDDFNCYDRQECVATKENPQVYFCCCEGNFCNEKFSYFPQMEVTQPTSNPVTPKPP

SEQ ID NO: 1587 - protein, 116 aa, synthetic construct
SGRGEAETRECIYYNANWELERTQQSGLERCEGEQDKRLHCYASWRNSSGTIEIVKKGCWLDDFNCYDRQECVATKENPQVYFCCCEGNFCNEKFSYFPQMEVTQPTSNPVTPKPP

SEQ ID NO: 1588 - protein, 111 aa, synthetic construct; identical to SEQ ID NO: 1462

SEQ ID NO: 1589 - protein, 112 aa, synthetic construct; identical to SEQ ID NO: 1463

SEQ ID NO: 1590 - protein, 113 aa, synthetic construct; identical to SEQ ID NO: 1464

SEQ ID NO: 1591 - protein, 114 aa, synthetic construct; identical to SEQ ID NO: 1465

SEQ ID NO: 1592 - protein, 115 aa, synthetic construct; identical to SEQ ID NO: 1466

SEQ ID NO: 1593 - protein, 116 aa, synthetic construct; identical to SEQ ID NO: 1467

SEQ ID NO: 1594 - protein, 111 aa, synthetic construct
AETRECIYYNANWELERTQQSGLERCEGDQDKRLHCYASWRNSSGTIEIVKKGCWLDDFNCYDRQECVAKKENPQVYFCCCEGNFCNEKFSYFPQMEVTQPTSNPVTPKPP

SEQ ID NO: 1595 - protein, 112 aa, synthetic construct
EAETRECIYYNANWELERTQQSGLERCEGDQDKRLHCYASWRNSSGTIEIVKKGCWLDDFNCYDRQECVAKKENPQVYFCCCEGNFCNEKFSYFPQMEVTQPTSNPVTPKPP

SEQ ID NO: 1596 - protein, 113 aa, synthetic construct
GEAETRECIYYNANWELERTQQSGLERCEGDQDKRLHCYASWRNSSGTIEIVKKGCWLDDFNCYDRQECVAKKENPQVYFCCCEGNFCNEKFSYFPQMEVTQPTSNPVTPKPP

SEQ ID NO: 1597 - protein, 114 aa, synthetic construct
RGEAETRECIYYNANWELERTQQSGLERCEGDQDKRLHCYASWRNSSGTIEIVKKGCWLDDFNCYDRQECVAKKENPQVYFCCCEGNFCNEKFSYFPQMEVTQPTSNPVTPKPP

SEQ ID NO: 1598 - protein, 115 aa, synthetic construct
GRGEAETRECIYYNANWELERTQQSGLERCEGDQDKRLHCYASWRNSSGTIEIVKKGCWLDDFNCYDRQECVAKKENPQVYFCCCEGNFCNEKFSYFPQMEVTQPTSNPVTPKPP

SEQ ID NO: 1599 - protein, 116 aa, synthetic construct
SGRGEAETRECIYYNANWELERTQQSGLERCEGDQDKRLHCYASWRNSSGTIEIVKKGCWLDDFNCYDRQECVAKKENPQVYFCCCEGNFCNEKFSYFPQMEVTQPTSNPVTPKPP

SEQ ID NO: 1600 - protein, 111 aa, synthetic construct
AETQECLFFNANWEKDRTQQTGVEPCYGDKDKRRHCFATWKNISGSIEIVKQGCWLDDINCYDRTDCVEKKDSPEVYFCCCEGNMCNERFTHLPEAGGPEVTYEPPPTAPT

SEQ ID NO: 1601 - protein, 112 aa, synthetic construct
EAETQECLFFNANWEKDRTQQTGVEPCYGDKDKRRHCFATWKNISGSIEIVKQGCWLDDINCYDRTDCVEKKDSPEVYFCCCEGNMCNERFTHLPEAGGPEVTYEPPPTAPT

SEQ ID NO: 1602 - protein, 113 aa, synthetic construct
GEAETQECLFFNANWEKDRTQQTGVEPCYGDKDKRRHCFATWKNISGSIEIVKQGCWLDDINCYDRTDCVEKKDSPEVYFCCCEGNMCNERFTHLPEAGGPEVTYEPPPTAPT

SEQ ID NO: 1603 - protein, 114 aa, synthetic construct
RGEAETQECLFFNANWEKDRTQQTGVEPCYGDKDKRRHCFATWKNISGSIEIVKQGCWLDDINCYDRTDCVEKKDSPEVYFCCCEGNMCNERFTHLPEAGGPEVTYEPPPTAPT

SEQ ID NO: 1604 - protein, 115 aa, synthetic construct
GRGEAETQECLFFNANWEKDRTQQTGVEPCYGDKDKRRHCFATWKNISGSIEIVKQGCWLDDINCYDRTDCVEKKDSPEVYFCCCEGNMCNERFTHLPEAGGPEVTYEPPPTAPT

SEQ ID NO: 1605 - protein, 116 aa, synthetic construct
SGRGEAETQECLFFNANWEKDRTQQTGVEPCYGDKDKRRHCFATWKNISGSIEIVKQGCWLDDINCYDRTDCVEKKDSPEVYFCCCEGNMCNERFTHLPEAGGPEVTYEPPPTAPT

SEQ ID NO: 1606 - protein, 111 aa, synthetic construct
AETRECIYYNANWELERTQQSGLERCYGDKDKRRHCYASWRNSSGTIELVKKGCWLDDINCYDRQECVATKENPQVYFCCCEGNFCNERFTHLPEAGGPEVTYEPPPTAPT

SEQ ID NO: 1607 - protein, 112 aa, synthetic construct
EAETRECIYYNANWELERTQQSGLERCYGDKDKRRHCYASWRNSSGTIELVKKGCWLDDINCYDRQECVATKENPQVYFCCCEGNFCNERFTHLPEAGGPEVTYEPPPTAPT

SEQ ID NO: 1608 - protein, 113 aa, synthetic construct
GEAETRECIYYNANWELERTQQSGLERCYGDKDKRRHCYASWRNSSGTIELVKKGCWLDDINCYDRQECVATKENPQVYFCCCEGNFCNERFTHLPEAGGPEVTYEPPPTAPT

SEQ ID NO: 1609 - protein, 114 aa, synthetic construct
RGEAETRECIYYNANWELERTQQSGLERCYGDKDKRRHCYASWRNSSGTIELVKKGCWLDDINCYDRQECVATKENPQVYFCCCEGNFCNERFTHLPEAGGPEVTYEPPPTAPT

SEQ ID NO: 1610 - protein, 115 aa, synthetic construct
GRGEAETRECIYYNANWELERTQQSGLERCYGDKDKRRHCYASWRNSSGTIELVKKGCWLDDINCYDRQECVATKENPQVYFCCCEGNFCNERFTHLPEAGGPEVTYEPPPTAPT

SEQ ID NO: 1611 - protein, 116 aa, synthetic construct
SGRGEAETRECIYYNANWELERTQQSGLERCYGDKDKRRHCYASWRNSSGTIELVKKGCWLDDINCYDRQECVATKENPQVYFCCCEGNFCNERFTHLPEAGGPEVTYEPPPTAPT

SEQ ID NO: 1612 - skipped

SEQ ID NO: 1613 - protein, 111 aa, synthetic construct
AETRECIYYNANWELERTNQSGLERCEGEQDKRLHCYASWRNSSGTIELVKKGCWDDDFNCYDRQECVATEENPQVYFCCCEGNFCNERFTHLPEAGGPEVTYEPPPTAPT

SEQ ID NO: 1614 - protein, 112 aa, synthetic construct
EAETRECIYYNANWELERTNQSGLERCEGEQDKRLHCYASWRNSSGTIELVKKGCWDDDFNCYDRQECVATEENPQVYFCCCEGNFCNERFTHLPEAGGPEVTYEPPPTAPT

SEQ ID NO: 1615 - protein, 113 aa, synthetic construct
GEAETRECIYYNANWELERTNQSGLERCEGEQDKRLHCYASWRNSSGTIELVKKGCWDDDFNCYDRQECVATEENPQVYFCCCEGNFCNERFTHLPEAGGPEVTYEPPPTAPT

SEQ ID NO: 1616 - protein, 114 aa, synthetic construct
RGEAETRECIYYNANWELERTNQSGLERCEGEQDKRLHCYASWRNSSGTIELVKKGCWDDDFNCYDRQECVATEENPQVYFCCCEGNFCNERFTHLPEAGGPEVTYEPPPTAPT

SEQ ID NO: 1617 - protein, 115 aa, synthetic construct
GRGEAETRECIYYNANWELERTNQSGLERCEGEQDKRLHCYASWRNSSGTIELVKKGCWDDDFNCYDRQECVATEENPQVYFCCCEGNFCNERFTHLPEAGGPEVTYEPPPTAPT

SEQ ID NO: 1618 - protein, 116 aa, synthetic construct
SGRGEAETRECIYYNANWELERTNQSGLERCEGEQDKRLHCYASWRNSSGTIELVKKGCWDDDFNCYDRQECVATEENPQVYFCCCEGNFCNERFTHLPEAGGPEVTYEPPPTAPT

SEQ ID NO: 1619 - protein, 111 aa, synthetic construct
AETRECIYYNANWELERTQQSGLERCEGEQDKRLHCYASWRNSSGTIELVKKGCWDDDFNCYDRQECVATEENPQVYFCCCEGNFCNERFTHLPEAGGPEVTYEPPPTAPT

SEQ ID NO: 1620 - protein, 112 aa, synthetic construct
EAETRECIYYNANWELERTQQSGLERCEGEQDKRLHCYASWRNSSGTIELVKKGCWDDDFNCYDRQECVATEENPQVYFCCCEGNFCNERFTHLPEAGGPEVTYEPPPTAPT

SEQ ID NO: 1621 - protein, 113 aa, synthetic construct
GEAETRECIYYNANWELERTQQSGLERCEGEQDKRLHCYASWRNSSGTIELVKKGCWDDDFNCYDRQECVATEENPQVYFCCCEGNFCNERFTHLPEAGGPEVTYEPPPTAPT

SEQ ID NO: 1622 - protein, 114 aa, synthetic construct
RGEAETRECIYYNANWELERTQQSGLERCEGEQDKRLHCYASWRNSSGTIELVKKGCWDDDFNCYDRQECVATEENPQVYFCCCEGNFCNERFTHLPEAGGPEVTYEPPPTAPT

SEQ ID NO: 1623 - protein, 115 aa, synthetic construct
GRGEAETRECIYYNANWELERTQQSGLERCEGEQDKRLHCYASWRNSSGTIELVKKGCWDDDFNCYDRQECVATEENPQVYFCCCEGNFCNERFTHLPEAGGPEVTYEPPPTAPT

SEQ ID NO: 1624 - protein, 116 aa, synthetic construct
SGRGEAETRECIYYNANWELERTQQSGLERCEGEQDKRLHCYASWRNSSGTIELVKKGCWDDDFNCYDRQECVATEENPQVYFCCCEGNFCNERFTHLPEAGGPEVTYEPPPTAPT

SEQ ID NO: 1625 - skipped

SEQ ID NO: 1626 - protein, 111 aa, synthetic construct
AETRECIYYNANWELERTNQSGLERCEGEQDKRLHCYASWRNSSGTIELVKKGCWEDDFNCYDRQECVATEENPQVYFCCCEGNFCNERFTHLPEAGGPEVTYEPPPTAPT

SEQ ID NO: 1627 - protein, 112 aa, synthetic construct
EAETRECIYYNANWELERTNQSGLERCEGEQDKRLHCYASWRNSSGTIELVKKGCWEDDFNCYDRQECVATEENPQVYFCCCEGNFCNERFTHLPEAGGPEVTYEPPPTAPT

SEQ ID NO: 1628 - protein, 113 aa, synthetic construct
GEAETRECIYYNANWELERTNQSGLERCEGEQDKRLHCYASWRNSSGTIELVKKGCWEDDFNCYDRQECVATEENPQVYFCCCEGNFCNERFTHLPEAGGPEVTYEPPPTAPT

SEQ ID NO: 1629 - protein, 114 aa, synthetic construct
RGEAETRECIYYNANWELERTNQSGLERCEGEQDKRLHCYASWRNSSGTIELVKKGCWEDDFNCYDRQECVATEENPQVYFCCCEGNFCNERFTHLPEAGGPEVTYEPPPTAPT

SEQ ID NO: 1630 - protein, 115 aa, synthetic construct
GRGEAETRECIYYNANWELERTNQSGLERCEGEQDKRLHCYASWRNSSGTIELVKKGCWEDDFNCYDRQECVATEENPQVYFCCCEGNFCNERFTHLPEAGGPEVTYEPPPTAPT

SEQ ID NO: 1631 - protein, 116 aa, synthetic construct
SGRGEAETRECIYYNANWELERTNQSGLERCEGEQDKRLHCYASWRNSSGTIELVKKGCWEDDFNCYDRQECVATEENPQVYFCCCEGNFCNERFTHLPEAGGPEVTYEPPPTAPT

SEQ ID NO: 1632 - protein, 111 aa, synthetic construct
AETRECIYYNANWELERTQQSGLERCEGEQDKRLHCYASWRNSSGTIELVKKGCWEDDFNCYDRQECVATEENPQVYFCCCEGNFCNERFTHLPEAGGPEVTYEPPPTAPT

SEQ ID NO: 1633 - protein, 112 aa, synthetic construct
EAETRECIYYNANWELERTQQSGLERCEGEQDKRLHCYASWRNSSGTIELVKKGCWEDDFNCYDRQECVATEENPQVYFCCCEGNFCNERFTHLPEAGGPEVTYEPPPTAPT

SEQ ID NO: 1634 - protein, 113 aa, synthetic construct
GEAETRECIYYNANWELERTQQSGLERCEGEQDKRLHCYASWRNSSGTIELVKKGCWEDDFNCYDRQECVATEENPQVYFCCCEGNFCNERFTHLPEAGGPEVTYEPPPTAPT

SEQ ID NO: 1635 - protein, 114 aa, synthetic construct
RGEAETRECIYYNANWELERTQQSGLERCEGEQDKRLHCYASWRNSSGTIELVKKGCWEDDFNCYDRQECVATEENPQVYFCCCEGNFCNERFTHLPEAGGPEVTYEPPPTAPT

SEQ ID NO: 1636 - protein, 115 aa, synthetic construct
GRGEAETRECIYYNANWELERTQQSGLERCEGEQDKRLHCYASWRNSSGTIELVKKGCWEDDFNCYDRQECVATEENPQVYFCCCEGNFCNERFTHLPEAGGPEVTYEPPPTAPT

SEQ ID NO: 1637 - protein, 116 aa, synthetic construct
SGRGEAETRECIYYNANWELERTQQSGLERCEGEQDKRLHCYASWRNSSGTIELVKKGCWEDDFNCYDRQECVATEENPQVYFCCCEGNFCNERFTHLPEAGGPEVTYEPPPTAPT

SEQ ID NO: 1638 - skipped

SEQ ID NO: 1639 - protein, 111 aa, synthetic construct
AETRECIYYNANWELERTNQSGLERCEGEQDKRLHCYASWANSSGTIELVKKGCWLDDFNCYDRQECVATEENPQVYFCCCEGNFCNERFTHLPEAGGPEVTYEPPPTAPT

SEQ ID NO: 1640 - protein, 112 aa, synthetic construct
EAETRECIYYNANWELERTNQSGLERCEGEQDKRLHCYASWANSSGTIELVKKGCWLDDFNCYDRQECVATEENPQVYFCCCEGNFCNERFTHLPEAGGPEVTYEPPPTAPT

SEQ ID NO: 1641 - protein, 113 aa, synthetic construct
GEAETRECIYYNANWELERTNQSGLERCEGEQDKRLHCYASWANSSGTIELVKKGCWLDDFNCYDRQECVATEENPQVYFCCCEGNFCNERFTHLPEAGGPEVTYEPPPTAPT

SEQ ID NO: 1642 - protein, 114 aa, synthetic construct
RGEAETRECIYYNANWELERTNQSGLERCEGEQDKRLHCYASWANSSGTIELVKKGCWLDDFNCYDRQECVATEENPQVYFCCCEGNFCNERFTHLPEAGGPEVTYEPPPTAPT

SEQ ID NO: 1643 - protein, 115 aa, synthetic construct
GRGEAETRECIYYNANWELERTNQSGLERCEGEQDKRLHCYASWANSSGTIELVKKGCWLDDFNCYDRQECVATEENPQVYFCCCEGNFCNERFTHLPEAGGPEVTYEPPPTAPT

SEQ ID NO: 1644 - protein, 116 aa, synthetic construct
SGRGEAETRECIYYNANWELERTNQSGLERCEGEQDKRLHCYASWANSSGTIELVKKGCWLDDFNCYDRQECVATEENPQVYFCCCEGNFCNERFTHLPEAGGPEVTYEPPPTAPT

SEQ ID NO: 1645 - protein, 111 aa, synthetic construct
AETRECIYYNANWELERTQQSGLERCEGEQDKRLHCYASWANSSGTIELVKKGCWLDDFNCYDRQECVATEENPQVYFCCCEGNFCNERFTHLPEAGGPEVTYEPPPTAPT

SEQ ID NO: 1646 - protein, 112 aa, synthetic construct
EAETRECIYYNANWELERTQQSGLERCEGEQDKRLHCYASWANSSGTIELVKKGCWLDDFNCYDRQECVATEENPQVYFCCCEGNFCNERFTHLPEAGGPEVTYEPPPTAPT

SEQ ID NO: 1647 - protein, 113 aa, synthetic construct
GEAETRECIYYNANWELERTQQSGLERCEGEQDKRLHCYASWANSSGTIELVKKGCWLDDFNCYDRQECVATEENPQVYFCCCEGNFCNERFTHLPEAGGPEVTYEPPPTAPT

SEQ ID NO: 1648 - protein, 114 aa, synthetic construct
RGEAETRECIYYNANWELERTQQSGLERCEGEQDKRLHCYASWANSSGTIELVKKGCWLDDFNCYDRQECVATEENPQVYFCCCEGNFCNERFTHLPEAGGPEVTYEPPPTAPT

SEQ ID NO: 1649 - protein, 115 aa, synthetic construct
GRGEAETRECIYYNANWELERTQQSGLERCEGEQDKRLHCYASWANSSGTIELVKKGCWLDDFNCYDRQECVATEENPQVYFCCCEGNFCNERFTHLPEAGGPEVTYEPPPTAPT

SEQ ID NO: 1650 - protein, 116 aa, synthetic construct
SGRGEAETRECIYYNANWELERTQQSGLERCEGEQDKRLHCYASWANSSGTIELVKKGCWLDDFNCYDRQECVATEENPQVYFCCCEGNFCNERFTHLPEAGGPEVTYEPPPTAPT

SEQ ID NO: 1651 - protein, 362 aa, synthetic construct
MEFGLSWVFLVALLRGVQCETRECIYYNANWELERTQQSGLERCEGDQDKRLHCYASWRNSSGTIELVKKGCWLDDINCYDRQECVATKENPQVYFCCCEGNFCNERFTHLPEAGGPEVTYEPPPTAPTGGGGSESKYGPPCPPCPAPEFLGGPSVFLFPPKPKDTLMISRTPEVTCVVVDVSQEDPEVQFNWYVDGVEVHNAKTKPREEQFNSTYRVVSVLTVLHQDWLNGKEYKCKVSNKGLPSSIEKTISKAKGQPREPQVYTLPPSQEEMTKNQVSLTCLVKGFYPSDIAVEWESNGQPENNYKTTPPVLDSDGSFFLYSRLTVDKSRWQEGNVFSCSVMHEALHNHYTQKSLSLSLG

SEQ ID NO: 1652 - DNA, 1089 bp, synthetic construct
  source 1..1089: mol_type = other DNA
atggagtttgggctgtcatgggttttcctcgtggccctcctccgtggagtgcagtgcgaaactcgtgagtgtatctattacaacgctaattgggagctcgagcggactcaacagagcggccttgaacgatgtgaaggggatcaagataaacgtttgcattgttacgccagttggaggaacagttccggcacaatagagcttgtcaagaagggttgttggctggatgacatcaattgttatgatagacaggaatgtgtggctacaaaagaaaacccccaagtctacttttgctgctgtgaagggaatttctgtaatgaaagatttacccacctgccagaagcaggaggacccgaggtaacatatgagcctcctccaacagctcccacaggtggtggtggttcagaatccaaatatggcccaccatgtcctccttgtcccgctcctgagttcttgggcggaccctccgtcttcctgtttccccctaagcccaaggacacactgatgatctctcgcacacccgaagtaacttgtgtagtagttgacgtttctcaagaggatcctgaagttcagttcaattggtacgtcgatggtgtggaggtgcacaacgctaaaacaaagccccgcgaggagcaattcaactccacttatcgtgtcgtaagcgtactcaccgtacttcatcaagactggctgaatgggaaagaatacaaatgcaaggtgtctaataaaggcctgccatctagtatcgagaaaactatttccaaagccaaaggccaaccacgagagccccaggtctatactctccctccctctcaagaagagatgactaagaaccaggtatcactgacttgtcttgtcaaaggattttaccctagcgatatcgctgtagaatgggaaagtaatgggcagcccgagaacaactataagactacccctcccgttctggatagcgacggctctttttttttgtacagtaggcttacagtggacaagtcccgatggcaagagggcaatgttttttcttgttcagtgatgcacgaagcactgcataaccactatacacaaaagtctctttccttgtctttgggttga

SEQ ID NO: 1653 - DNA, 1032 bp, synthetic construct
  source 1..1032: mol_type = other DNA
gaaactcgtgagtgtatctattacaacgctaattgggagctcgagcggactcaacagagcggccttgaacgatgtgaaggggatcaagataaacgtttgcattgttacgccagttggaggaacagttccggcacaatagagcttgtcaagaagggttgttggctggatgacatcaattgttatgatagacaggaatgtgtggctacaaaagaaaacccccaagtctacttttgctgctgtgaagggaatttctgtaatgaaagatttacccacctgccagaagcaggaggacccgaggtaacatatgagcctcctccaacagctcccacaggtggtggtggttcagaatccaaatatggcccaccatgtcctccttgtcccgctcctgagttcttgggcggaccctccgtcttcctgtttccccctaagcccaaggacacactgatgatctctcgcacacccgaagtaacttgtgtagtagttgacgtttctcaagaggatcctgaagttcagttcaattggtacgtcgatggtgtggaggtgcacaacgctaaaacaaagccccgcgaggagcaattcaactccacttatcgtgtcgtaagcgtactcaccgtacttcatcaagactggctgaatgggaaagaatacaaatgcaaggtgtctaataaaggcctgccatctagtatcgagaaaactatttccaaagccaaaggccaaccacgagagccccaggtctatactctccctccctctcaagaagagatgactaagaaccaggtatcactgacttgtcttgtcaaaggattttaccctagcgatatcgctgtagaatgggaaagtaatgggcagcccgagaacaactataagactacccctcccgttctggatagcgacggctctttttttttgtacagtaggcttacagtggacaagtcccgatggcaagagggcaatgttttttcttgttcagtgatgcacgaagcactgcataaccactatacacaaaagtctctttccttgtctttgggttga

SEQ ID NO: 1654 - protein, 110 aa, synthetic construct; identical to SEQ ID NO: 2

SEQ ID NO: 1655 - protein, 110 aa, synthetic construct
  VARIANT 18: note = Wherein X is any amino acid other than N
ETQECLFFNANWEKDRTXQTGVEPCYGDKDKRRHCFATWKNISGSIEIVKQGCWLDDINCYDRTDCVEKKDSPEVYFCCCEGNMCNEKFSYFPEMEVTQPTSNPVTPKPP

SEQ ID NO: 1656 - protein, 110 aa, synthetic construct
ETQECLFFNANWEKDRTQQTGVEPCYGDKDKRRHCFATWKNISGSIEIVKQGCWLDDINCYDRTDCVEKKDSPEVYFCCCEGNMCNEKFSYFPEMEVTQPTSNPVTPKPP

SEQ ID NO: 1657 - protein, 110 aa, synthetic construct
  VARIANT 20: note = Wherein X is any amino acid other than S or T
ETQECLFFNANWEKDRTNQXGVEPCYGDKDKRRHCFATWKNISGSIEIVKQGCWLDDINCYDRTDCVEKKDSPEVYFCCCEGNMCNEKFSYFPEMEVTQPTSNPVTPKPP

SEQ ID NO: 1658 - protein, 107 aa, synthetic construct
ETRECIYYNANWELERTNQSGLERCEGEQDKRLHCYASWRNSSGTIELVKKGCWDDDFNCYDRQECVATEENPQVYFCCCEGNFCNERFTHLPEAGGPEVTYEPPPT

SEQ ID NO: 1659 - protein, 107 aa, synthetic construct
  VARIANT 18: note = Wherein X is any amino acid other than N
ETRECIYYNANWELERTXQSGLERCEGEQDKRLHCYASWRNSSGTIELVKKGCWDDDFNCYDRQECVATEENPQVYFCCCEGNFCNERFTHLPEAGGPEVTYEPPPT

SEQ ID NO: 1660 - protein, 107 aa, synthetic construct
ETRECIYYNANWELERTQQSGLERCEGEQDKRLHCYASWRNSSGTIELVKKGCWDDDFNCYDRQECVATEENPQVYFCCCEGNFCNERFTHLPEAGGPEVTYEPPPT

SEQ ID NO: 1661 - protein, 106 aa, synthetic construct
  VARIANT 19: note = Wherein X is any amino acid other than S or T
TRECIYYNANWELERTNQXGLERCEGEQDKRLHCYASWRNSSGTIELVKKGCWDDDFNCYDRQECVATEENPQVYFCCCEGNFCNERFTHLPEAGGPEVTYEPPPT

SEQ ID NO: 1662-1663 - skipped (2 entries)

SEQ ID NO: 1664 - protein, 335 aa, synthetic construct
  VARIANT 18: note = Wherein X is any amino acid other than N
ETRECIYYNANWELERTXQSGLERCEGEQDKRLHCYASWRNSSGTIELVKKGCWDDDFNCYDRQECVATEENPQVYFCCCEGNFCNERFTHLPEAGGPEVTYEPPPTGGGTHTCPPCPAPELLGGPSVFLFPPKPKDTLMISRTPEVTCVVVDVSHEDPEVKFNWYVDGVEVHNAKTKPREEQYNSTYRVVSVLTVLHQDWLNGKEYKCKVSNKALPAPIEKTISKAKGQPREPQVYTLPPSREEMTKNQVSLTCLVKGFYPSDIAVEWESNGQPENNYKTTPPVLDSDGSFFLYSKLTVDKSRWQQGNVFSCSVMHEALHNHYTQKSLSLSPGK

SEQ ID NO: 1665 - protein, 344 aa, synthetic construct
  VARIANT 23: note = Wherein X is any amino acid other than N
ILGRSETQECLFFNANWEKDRTXQTGVEPCYGDKDKRRHCFATWKNISGSIEIVKQGCWLDDINCYDRTDCVEKKDSPEVYFCCCEGNMCNEKFSYFPEMEVTQPTSNPVTPKPPTGGGTHTCPPCPAPELLGGPSVFLFPPKPKDTLMISRTPEVTCVVVDVSHEDPEVKFNWYVDGVEVHNAKTKPREEQYNSTYRVVSVLTVLHQDWLNGKEYKCKVSNKALPVPIEKTISKAKGQPREPQVYTLPPSREEMTKNQVSLTCLVKGFYPSDIAVEWESNGQPENNYKTTPPVLDSDGSFFLYSKLTVDKSRWQQGNVFSCSVMHEALHNHYTQKSLSLSPGK

SEQ ID NO: 1666 - protein, 111 aa, synthetic construct
AETRECIYYNANWELERTNQSGLERCYGDKDKRRHCYASWRNSSGTIELVKKGCWLDDINCYDRTDCVEKKDSPEVYFCCCEGNFCNERFTHLPEAGGPEVTYEPPPTAPT

What is claimed is:

1. An isolated protein comprising a mutant soluble activin IIB receptor (ActRIIB) extracellular domain (ActRIIB-ECD), wherein said mutant soluble ActRIIB-ECD comprises a mutation to remove the N-linked glycosylation site corresponding to position N18 of SEQ ID NO: 1.

2. The isolated protein of claim 1, wherein the mutant soluble ActRIIB-ECD further comprises a substitution of at least one of amino acid residues R3, I6, Y7, Y8, L14, E15, S20, L22, R24, E26, E28, Q29, L33, L48, Y36, S38, R40, S42, T45, K51, F58, Q64, E65, A68, T69, E70, E71, N72, Q74, F84, R88, T90, H91, L92, E94, A95, G96, G97, P98, E99, V100, Y102, E103, P105, P106, T107, A108, or T110 of SEQ ID NO: 1 with another amino acid.

3. The isolated protein of claim 1, wherein the mutant soluble ActRIIB-ECD comprises an amino acid sequence at least 95% identical to an amino acid sequence selected from the group consisting of SEQ ID NOs: 1, 3-37, 51-117, 327, 330, 333, and 1658, wherein the asparagine at position N18 is substituted with another amino acid.

4. The isolated protein of claim 1, wherein the mutant soluble ActRIIB-ECD comprises an amino acid sequence selected from the group consisting of SEQ ID NOs: 1, 3-37, 51-117, 327, 330, 333, and 1658, wherein the asparagine at position N18 is substituted with another amino acid.

5. The isolated protein of claim 1, wherein the serine at position S20 of SEQ ID NO: 1 is substituted with an amino acid that is not serine(S) or threonine (T).

6. The isolated protein of any one or combination of claims 1-5, wherein the asparagine at position N18 is substituted with glutamine (Q).

7. The isolated protein of claim 1, wherein the mutant soluble ActRIIB-ECD comprises an amino acid sequence selected from the group consisting of SEQ ID NOs: 119, 120-221, 329, 332, 335, and 1660.

8. The isolated protein of claim 1, wherein the mutant soluble ActRIIB-ECD comprises an amino acid sequence selected from the group consisting of SEQ ID NOs: 336-354.

9. The isolated protein of claim 1, wherein the mutant soluble ActRIIB-ECD comprises an amino acid sequence selected from the group consisting of SEQ ID NOs: 355-372.

10. The isolated protein of any one or combination of claims 1-9, wherein said mutant soluble ActRIIB-ECD demonstrates increased binding of myostatin relative to an otherwise identical soluble ActRIIB-ECD that includes the N-linked glycosylation site corresponding to position N18 of SEQ ID NO: 1.

11. The isolated protein of any one or combination of claims 1-10, wherein said mutant soluble ActRIIB-ECD is glycosylated at an asparagine residue corresponding to position N41 of SEQ ID NO: 1.

12. The isolated protein of claim 11, wherein the glycosylated mutant soluble ActRIIB-ECD is sialylated.

13. The isolated protein of claim 11, wherein a sample of said mutant soluble ActRIIB-ECD comprises at least 40% sialylated glycans.

14. The isolated protein of any one or combination of claims 1-13, wherein the mutant soluble ActRIIB-ECD is fused to at least one heterologous protein.

15. The isolated protein of claim 14, wherein the heterologous protein comprises a constant domain of an immunoglobulin.

16. The isolated protein of any one or combination of claims 14-15, wherein the heterologous protein comprises an Fc domain of an immunoglobulin.

17. The isolated protein of claim 16, wherein the Fc domain is selected from the group consisting of the Fc domain of a human immunoglobulin gamma-1 (IgG1), the Fc domain of a human immunoglobulin gamma-2 (IgG2), and the Fc domain of a human immunoglobulin gamma-4 (IgG4).

18. The isolated protein of any one or combination of claims 1-17, wherein the mutant soluble ActRIIB-ECD is fused to the heterologous protein by a peptide linker sequence.

19. The isolated protein of any one or combination of claims 14-18, wherein the heterologous protein comprises a human Fc domain comprising an amino acid sequence selected from the group consisting of: SEQ ID NO: 39, SEQ ID NO: 41, and SEQ ID NO: 43.

20. The isolated protein of any one or combination of claims 1-19, wherein the isolated protein comprises a linker comprising the amino acid sequence set forth in SEQ ID NO: 44 between the mutant soluble ActRIIB-ECD and the heterologous protein.

21. The isolated protein of any one or combination of claims 1-20, wherein the isolated protein comprises a hinge linker comprising the amino acid sequence set forth in SEQ ID NO: 118 between the mutant soluble ActRIIB-ECD and the heterologous protein.

22. The isolated protein of any one or combination of claims 1-21, wherein the isolated protein comprises a linker comprising the amino acid sequence set forth in SEQ ID NO: 44 and a hinge linker comprising the amino acid sequence set forth in SEQ ID NO: 118 between the mutant soluble ActRIIB-ECD and the heterologous protein.

23. The isolated protein of any one or combination of claims 1-22, wherein the isolated protein comprises, in an N-terminal to C-terminal direction, the mutant soluble ActRIIB-ECD, the linker of SEQ ID NO: 44, the hinge linker of SEQ ID NO: 118, and the heterologous protein.

24. The isolated protein of any one or combination of claims 1-23, wherein the mutant soluble ActRIIB-ECD comprises an amino acid sequence selected from the group consisting of SEQ ID NOs: 119, 120-221, 329, 332,335, 336-354, 355-372, and 1660 and wherein the heterologous protein is selected from the group consisting of the Fc domain of a human immunoglobulin gamma-1 (IgG1), the Fc domain of a human immunoglobulin gamma-2 (IgG2), and the Fc domain of a human immunoglobulin gamma-4 (IgG4).

25. The isolated protein of claim 24, wherein the mutant soluble ActRIIB-ECD comprises SEQ ID NO: 146 and the heterologous protein comprises the Fc domain of a human IgG4.

26. The isolated protein of claim 1, wherein the isolated protein comprises SEQ ID NO: 222 or 1664.

27. The isolated protein of claim 1, wherein the isolated protein consists of SEQ ID NO: 222 or 1664.

28. The isolated protein of any one or combination of claims 24-27, wherein said isolated protein is glycosylated at an asparagine residue in the mutant soluble ActRIIB-ECD corresponding to positions N41 of SEQ ID NO: 1 and/or an asparagine residue in the Fc domain corresponding to position N67 of SEQ ID NO: 43.

29. The isolated protein of claim 28, wherein a sample of said isolated protein comprises at least 40% sialylated glycans.

30. A pharmaceutical composition comprising a therapeutically effective amount of the isolated protein of any one of claims 1-29 in admixture with a pharmaceutically acceptable carrier.

31. The pharmaceutical composition of claim 30, wherein the pharmaceutical composition is formulated for administration by a route selected from the group consisting of:
subcutaneous, intramuscular, intravenous, and intrathecal administration.

32. The pharmaceutical composition of claim 30 or 31, wherein said pharmaceutical composition further comprises a second agent, wherein said second agent is selected from the group consisting of: growth hormone, ghrelin, IGF1, insulin, prednisone, corticosteroid therapy, androgen-deprivation therapy, anabolic steroids, an antagonist of angiotensin or angiotensin receptor, an antagonist of an inflammatory cytokine such as TNF-alpha, IL-6, IL-1 or their receptors, an antagonist of myostatin, activin A or another member of the TGF-beta family or their receptors, bisphosphonates, RANKL inhibitors, agonists of peroxisome proliferator-activated receptors, β2 agonists, activator of PGC-1 alpha, proteasome inhibitors, a cancer therapeutic, a chemotherapeutic agent, a cell therapy, a stem cell therapy, gene therapy, gene targeting therapy, and an antisense oligonucleotide.

33. The pharmaceutical composition of any one or combination of claims 30-32, wherein the pharmaceutical composition comprises a plurality of the isolated proteins and at least 40% of the isolated proteins are sialylated.

34. A sample comprising a plurality of the isolated proteins of any one or combination of claims 1-29, wherein at least 40% of the isolated proteins are sialylated.

35. A method of treating a myostatin-related or activin A-related disorder in a subject in need thereof, comprising administering a therapeutically effective amount of the pharmaceutical composition of any one of claims 30-33 to the subject.

36. The method of claim 35, wherein said myostatin-related or activin A-related disorder is selected from the group consisting of muscle wasting, a bone disorder, a metabolic disorder, and anemia.

37. The method of claim 36, wherein the muscle wasting is associate with a condition selected from the group consisting of: muscular dystrophy, myositis, myopathy, motorneuron disease, muscle atrophy, amyotrophic lateral sclerosis, spinal muscular atrophy, neuromuscular junction disease, peripheral nerve disease, spinal cord injury, stroke, neurodegenerative disease, anorexia, cancer, organ failure, trauma, disuse, infection, chronic obstructive pulmonary disease (COPD), sarcopenia, sarcopenic obesity, osteroarthritis, androgen deprivation, emphysema, cystic fibrosis, chronic heart failure, cardiac atrophy, cancer cachexia, renal failure, uremia, protein energy wasting, anorexia, malnutrition, sarcopenia, Acquired Immunodeficiency Syndrome (AIDS), sepsis, burn injury, diabetes, carpal tunnel syndrome, prolonged bed rest, bone fracture, aging, and exposure to microgravity.

38. The method of claim 37, wherein said spinal muscular atrophy is selected from the group consisting of infantile progressive spinal muscular atrophy, intermediate spinal muscular atrophy, juvenile spinal muscular atrophy and adult spinal muscular atrophy.

39. The method of claim 37, wherein said peripheral nerve disease is selected from the group consisting of Charcot-Marie Tooth disease, Dejerine-Sottas disease and Friedreich's ataxia.

40. The method of claim 37, wherein said neurodegenerative disease is selected from the group consisting of Parkinson's disease, Huntington's disease, Alzheimer's disease and Creutzfeldt-Jakob disease.

41. The method of claim 37, wherein said aging condition is selected from the group consisting of: frailty of the elderly, age-related sarcopenia, and osteoarthritis.

42. The method of claim 37, wherein said motorneuron disease is amyotrophic lateral sclerosis.

43. The method of claim 37, wherein said myopathy is critical illness myopathy or intensive care unit (ICU) myopathy.

44. The method of claim 37, wherein said muscular dystrophy is myotonic dystrophy type 1 (DM1), Facioscapulohumeral muscular dystrophy (FSHD), Limb-girdle muscular dystrophies (LGMD), or Duchenne muscular dystrophy (DMD).

45. The method of claim 36, wherein said bone disorder is selected from the group consisting of: osteoporosis, renal osteodystrophy, osteomalacia, osteogenesis imperfecta, fibrodysplasia ossificans progressiva, corticosteroid-induced bone loss, androgen-deprivation therapy-induced bone loss, bone fracture, cancer-induced bone loss, bone metastasis, Paget's disease of the bone, Rickets, Perthes' disease and fibrous dysplasia.

46. The method of any one or combination of claims 35-45, wherein the method further comprises administering a second agent to the subject in need thereof, wherein the second agent is administered prior to, concurrently with, or subsequent to administration of the pharmaceutical composition.

47. A polynucleotide encoding a protein comprising:
a. a mutant soluble ActRIIB-ECD sequence selected from the group consisting of SEQ ID NOs: 119, 120-221, 329, 332, 335, 336-354, 355-372, and 1660, and
b. an Fc domain sequence of a human IgG.

48. A polynucleotide of claim 47, wherein the protein further comprises:
a. the peptide linker sequence of SEQ ID NO: 44;
b the hinge linker sequence of SEQ ID NO: 118; or
c. both the peptide linker sequence of SEQ ID NO: 44 and the hinge linker sequence of SEQ ID NO: 118.

49. A polynucleotide of claim 47 or 48, wherein the polynucleotide further comprises a signal peptide sequence.

50. A polynucleotide comprising a DNA sequence of SEQ ID NO: 1653.

51. A vector comprising the polynucleotide of any of claims 47-50.

52. A host cell comprising the polynucleotide of any claims 47-50.

53. The host cell of claim 52, wherein the host cell is a mammalian cell.

54. A method of producing a protein comprising a mutant soluble ActRIIB-ECD comprising culturing the host cell of claim 52 or 53 under conditions promoting the expression of the protein, and recovering the protein.

55. The method of claim 54, wherein the method further comprises purifying the protein using one or more of Protein A chromatography, size exclusion chromatography, or ion exchange chromatography.
